(19) United States
(12) Patent Application Publication
(10) Pub. No.: US 2022/0323480 A1
(43) Pub. Date: Oct. 13, 2022

(54) CIRCULAR RNA COMPOSITIONS AND METHODS

(71) Applicant: Orna Therapeutics, Inc., Cambridge, MA (US)

(72) Inventors: Brian Goodman, Cambridge, MA (US); Alex Wesselhoeft, Cambridge, MA (US); Allen Horhota, Cambridge, MA (US); Junghoon Yang, Cambridge, MA (US)

(21) Appl. No.: 17/202,223

(22) Filed: Mar. 15, 2021

Related U.S. Application Data
(63) Continuation of application No. PCT/US2020/063494, filed on Dec. 4, 2020.
(60) Provisional application No. 63/087,582, filed on Oct. 5, 2020.
(60) Provisional application No. 63/022,248, filed on May 8, 2020.
(60) Provisional application No. 62/972,194, filed on Feb. 10, 2020.
(60) Provisional application No. 62/943,779, filed on Dec. 4, 2019.
(60) Provisional application No. 62/943,797, filed on Dec. 4, 2019.

(51) Int. Cl. A61K 31/7105; A61K 47/22

(52) U.S. Cl. CPC A61K 31/7105; A61K 47/22

(57) ABSTRACT

Disclosed herein are circular RNAs and transfer vehicles, along with related compositions and methods of treatment. The circular RNAs can comprise group I intron fragments, spacers, an IRES, duplex forming regions, and/or an expression sequence, thereby having the features of improved expression, functional stability, low immunogenicity, ease of manufacturing, and/or extended half-life compared to linear RNA. Pharmaceutical compositions comprising such circular RNAs and transfer vehicles are particularly suitable for efficient protein expression in immune cells in vivo. Also disclosed are precursor RNAs and materials useful in producing the precursor or circular RNAs, which have improved circularization efficiency and/or are compatible with effective circular RNA purification methods.

### CROSS REFERENCE TO RELATED APPLICATIONS

[0001] This application is a continuation of International Application No. PCT/US2020/063494, filed Dec. 4, 2020, which claims the benefit of U.S. Provisional Application No. 62/943,779, filed on Dec. 4, 2019; U.S. Provisional Application No. 62/972,194, filed on Feb. 10, 2020; U.S. Provisional Application No. 63/022,248, filed on May 8, 2020; U.S. Provisional Application No. 63/087,582, filed on Oct. 5, 2020; and U.S. Provisional Application No. 62/943,797, filed on Dec. 4, 2019, the contents of each of which are hereby incorporated by reference in their entirety for all purposes.

### SEQUENCE LISTING

[0002] The instant application contains a Sequence Listing which has been submitted electronically in ASCII format and is hereby incorporated by reference in its entirety. Said ASCII copy, created on Apr. 8, 2021, is named OBS-011WOC1_Sequence_Listing.txt and is 588,501 bytes in size.

### BACKGROUND

[0003] Conventional gene therapy involves the use of DNA for insertion of desired genetic information into host cells. The DNA introduced into the cell is usually integrated to a certain extent into the genome of one or more transfected cells, allowing for long-lasting action of the introduced genetic material in the host. While there may be substantial benefits to such sustained action, integration of exogenous DNA into a host genome may also have many deleterious effects. For example, it is possible that the introduced DNA will be inserted into an intact gene, resulting in a mutation which impedes or even totally eliminates the function of the endogenous gene. Thus, gene therapy with DNA may result in the impairment of a vital genetic function in the treated host, such as, e.g., elimination or deleteriously reduced production of an essential enzyme or interruption of a gene critical for the regulation of cell growth, resulting in unregulated or cancerous cell proliferation. In addition, with conventional DNA based gene therapy it is necessary for effective expression of the desired gene product to include a strong promoter sequence, which again may lead to undesirable changes in the regulation of normal gene expression in the cell. It is also possible that the DNA based genetic material will result in the induction of undesired anti-DNA antibodies, which in turn, may trigger a possibly fatal immune response. Gene therapy approaches using viral vectors can also result in an adverse immune response. In some circumstances, the viral vector may even integrate into the host genome. In addition, production of clinical grade viral vectors is also expensive and time consuming. Targeting delivery of the introduced genetic material using viral vectors can also be difficult to control. Thus, while DNA based gene therapy has been evaluated for delivery of secreted proteins using viral vectors (U.S. Pat. No. 6,066,626; US2004/0110709), these approaches may be limited for these various reasons.

[0004] In contrast to DNA, the use of RNA as a gene therapy agent is substantially safer because RNA does not involve the risk of being stably integrated into the genome of the transfected cell, thus eliminating the concern that the introduced genetic material will disrupt the normal functioning of an essential gene, or cause a mutation that results in deleterious or oncogenic effects, and extraneous promoter sequences are not required for effective translation of the encoded protein, again avoiding possible deleterious side effects. In addition, it is not necessary for mRNA to enter the nucleus to perform its function, while DNA must overcome this major barrier.

[0005] Circular RNA is useful in the design and production of stable forms of RNA. The circularization of an RNA molecule provides an advantage to the study of RNA structure and function, especially in the case of molecules that are prone to folding in an inactive conformation (Wang and Ruffner, 1998). Circular RNA can also be particularly interesting and useful for in vivo applications, especially in the research area of RNA-based control of gene expression and therapeutics, including protein replacement therapy and vaccination.

[0006] Prior to this invention, there were three main techniques for making circularized RNA in vitro: the splint-mediated method, the permuted intron-exon method, and the RNA ligase-mediated method. However, the existing methodologies are limited by the size of RNA that can be circularized, thus limiting their therapeutic application.

### SUMMARY

[0007] The present application provides circular RNAs and transfer vehicles, along with related compositions and methods of treatment. The transfer vehicles can comprise, e.g., ionizable lipid, PEG-modified lipid, and/or structural lipid, thereby forming lipid nanoparticles encapsulating the circular RNAs. The circular RNAs can comprise group I intron fragments, spacers, an IRES, duplex forming regions, and/or an expression sequence, thereby having the features of improved expression, functional stability, low immunogenicity, ease of manufacturing, and/or extended half-life compared to linear RNA.

[0008] Pharmaceutical compositions comprising such circular RNAs and transfer vehicles are particularly suitable for efficient protein expression in immune cells in vivo. The present application also provides precursor RNAs and materials useful in producing the precursor or circular RNAs, which have improved circularization efficiency and/or are compatible with effective circular RNA purification methods.

[0009] Accordingly, one aspect of the present application provides a pharmaceutical composition comprising a circular RNA polynucleotide and a transfer vehicle comprising an ionizable lipid represented by Formula (1):

[chemical structure]

wherein:

[0010] each n is independently an integer from 2-15;

[0011] L₁ and L₃ are each independently —OC(O)—* or —C(O)O—*, wherein “*” indicates the attachment point to R₁ or R₃;

[0012] R₁ and R₃ are each independently a linear or branched C₉-C₂₀ alkyl or C₉-C₂₀ alkenyl, optionally substituted by one or more substituents selected from a group consisting of oxo, halo, hydroxy, cyano, alkyl, alkenyl, aldehyde, heterocyclylalkyl, hydroxyalkyl, dihydroxyalkyl, hydroxyalkylaminoalkyl, aminoalkyl, alkylaminoalkyl, dialkylaminoalkyl, (heterocyclyl)(alkyl)aminoalkyl, heterocyclyl, heteroaryl, alkylheteroaryl, alkynyl, alkoxy, amino, dialkylamino, aminoalkylcarbonylamino, aminocarbonylalkylamino, (aminocarbonylalkyl)(alkyl)amino, alkenylcarbonylamino, hydroxycarbonyl, alkyloxycarbonyl, aminocarbonyl, aminoalkylaminocarbonyl, alkylaminoalkylaminocarbonyl, dialkylaminoalkylaminocarbonyl, heterocyclylalkylaminocarbonyl, (alkylaminoalkyl) (alkyl) amino carbonyl, alkylaminoalkylcarbonyl, dialkylaminoalkylcarbonyl, heterocyclylcarbonyl, alkenylcarbonyl, alkynylcarbonyl, alkylsulfoxide, alkylsulfoxidealkyl, alkylsulfonyl, and alkylsulfonealkyl; and

[0013] R₂ is selected from a group consisting of:

[chemical structure]

[chemical structure]

[0014] In some embodiments, R₁ and R₃ are each independently selected from a group consisting of:

[chemical structure]

In some embodiments, R₁ and R₃ are the same. In some embodiments, R₁ and R₃ are different.

[0015] In some embodiments, the ionizable lipid of Formula (1) is represented by Formula (1-1) or Formula (1-2):

[chemical structure]

[0016] In some embodiments, the ionizable lipid is selected from the group consisting of:

[chemical structure]

[0017] In another aspect, the present application provides a pharmaceutical composition comprising: a circular RNA polynucleotide and a transfer vehicle comprising an ionizable lipid represented by Formula (2):

[chemical structure]

wherein:

[0018] each n is independently an integer from 1-15;

[0019] R₁ and R₂ are each independently selected from a group consisting of:

[chemical structure]

[chemical structure]

and

[0020] R₁ is selected from a group consisting of:

[chemical structure]

[0021] In another aspect, the present application provides a pharmaceutical composition comprising: a circular RNA polynucleotide, and a transfer vehicle comprising an ionizable lipid represented by Formula (3):

[chemical structure]

wherein:

[0022] X is selected from —O—, —S—, or —OC(O)—*, wherein * indicates the attachment point to R₁;

[0023] R₁ is selected from a group consisting of:

[chemical structure]

and

[0024] R₂ is selected from a group consisting of:

[chemical structure]

[chemical structure]

[0025] In some embodiments, the ionizable lipid of Formula (3) is represented by Formula (3-1), Formula (3-2), or Formula (3-3):

[chemical structure]

[0026] In another aspect, the present application provides a pharmaceutical composition comprising: a circular RNA polynucleotide, and a transfer vehicle comprising an ionizable lipid represented by Formula (4):

[chemical structure]

wherein: each n is independently an integer from 2-15; and R₂ is defined in Formula (1).

[0027] In another aspect, the present application provides a pharmaceutical composition comprising: a circular RNA polynucleotide, and a transfer vehicle comprising an ionizable lipid selected from Table 10a.

[0028] In some embodiments, the circular RNA comprises a first expression sequence. In some embodiments, the first expression sequence encodes a therapeutic protein. In some embodiments, the first expression sequence encodes a cytokine or a functional fragment thereof. In some embodiments, the first expression sequence encodes a transcription factor. In some embodiments, the first expression sequence encodes an immune checkpoint inhibitor. In some embodiments, the first expression sequence encodes a chimeric antigen receptor.

[0029] In some embodiments, the circular RNA polynucleotide further comprises a second expression sequence. In some embodiments, the circular RNA polynucleotide further comprises an internal ribosome entry site (IRES).

[0030] In some embodiments, the first and second expression sequences are separated by a ribosomal skipping element or a nucleotide sequence encoding a protease cleavage site. In some embodiments, the first expression sequence encodes a first T-cell receptor (TCR) chain and the second expression sequence encodes a second TCR chain.

[0031] In some embodiments, the circular RNA polynucleotide comprises one or more microRNA binding sites. the microRNA binding site is recognized by a microRNA expressed in the liver. In some embodiments, the microRNA binding site is recognized by miR-122.

[0032] In some embodiments, the circular RNA polynucleotide comprises a first IRES associated with greater protein expression in a human immune cell than in a reference human cell. In some embodiments, the human immune cell is a T cell, an NK cell, an NKT cell, a macrophage, or a neutrophil. In some embodiments, the reference human cell is a hepatic cell.

[0033] In some embodiments, the circular RNA polynucleotide comprises, in the following order: a) a post-splicing intron fragment of a 3′ group I intron fragment, b) an IRES, c) an expression sequence, and d) a post-splicing intron fragment of a 5′ group I intron fragment. In some embodiments, the circular RNA polynucleotide comprises. In some embodiments, the circular RNA polynucleotide comprises a first spacer before the post-splicing intron fragment of the 3′ group I intron fragment, and a second spacer after the post-splicing intron fragment of the 5′ group I intron fragment. In some embodiments, the first and second spacers each have a length of about 10 to about 60 nucleotides.

[0034] In some embodiments, the circular RNA polynucleotide is made via circularization of a RNA polynucleotide comprising, in the following order: a 3′ group I intron fragment, an IRES, an expression sequence, and a 5′ group I intron fragment.

[0035] In some embodiments, the circular RNA polynucleotide is made via circularization of a RNA polynucleotide comprising, in the following order: a 5′ external duplex forming region, a 3′ group I intron fragment, a 5′ internal spacer optionally comprising a 5′ internal duplex forming region, an IRES, an expression sequence, a 3′ internal spacer optionally comprising a 3′ internal duplex forming region, a 5′ group I intron fragment, and a 3′ external duplex forming region.

[0036] In some embodiments, the circular RNA polynucleotide is made via circularization of a RNA polynucleotide comprising, in the following order: a 5′ external duplex forming region, a 5′ external spacer, a 3′ group I intron fragment, a 5′ internal spacer optionally comprising a 5′ internal duplex forming region, an IRES, an expression sequence, a 3′ internal spacer optionally comprising a 3′ internal duplex forming region, a 5′ group I intron fragment, a 3′ external spacer, and a 3′ external duplex forming region.

[0037] In some embodiments, the circular RNA polynucleotide is made via circularization of a RNA polynucleotide comprising, in the following order: a 3′ group I intron fragment, a 5′ internal spacer comprising a 5′ internal duplex forming region, an IRES, an expression sequence, a 3′ internal spacer comprising a 3′ internal duplex forming region, and a 5′ group I intron fragment.

[0038] In some embodiments, the circular RNA polynucleotide is made via circularization of a RNA polynucleotide comprising, in the following order: a 5′ external duplex forming region, a 5′ external spacer, a 3′ group I intron fragment, a 5′ internal spacer comprising a 5′ internal duplex forming region, an IRES, an expression sequence, a 3′ internal spacer comprising a 3′ internal duplex forming region, a 5′ group I intron fragment, a 3′ external spacer, and a 3′ external duplex forming region.

[0039] In some embodiments, the circular RNA polynucleotide is made via circularization of a RNA polynucleotide comprising, in the following order: a first polyA sequence, a 5′ external duplex forming region, a 5′ external spacer, a 3′ group I intron fragment, a 5′ internal spacer comprising a 5′ internal duplex forming region, an IRES, an expression sequence, a 3′ internal spacer comprising a 3′ internal duplex forming region, a 5′ group I intron fragment, a 3′ external spacer, a 3′ external duplex forming region, and a second polyA sequence.

[0040] In some embodiments, the circular RNA polynucleotide is made via circularization of a RNA polynucleotide comprising, in the following order: a first polyA sequence, a 5′ external spacer, a 3′ group I intron fragment, a 5′ internal spacer comprising a 5′ internal duplex forming region, an IRES, an expression sequence, a 3′ internal spacer comprising a 3′ internal duplex forming region, a 5′ group I intron fragment, a 3′ external spacer, and a second polyA sequence.

[0041] In some embodiments, the circular RNA polynucleotide is made via circularization of a RNA polynucleotide comprising, in the following order: a first polyA sequence, a 5′ external spacer, a 3′ group I intron fragment, a 5′ internal spacer comprising a 5′ internal duplex forming region, an IRES, an expression sequence, a stop condon, a 3′ internal spacer comprising a 3′ internal duplex forming region, a 5′ group I intron fragment, a 3′ external spacer, and a second polyA sequence.

[0042] In some embodiments, at least one of the 3′ or 5′ internal or external spacers has a length of about 8 to about 60 nucleotides. In some embodiments, the 3′ and 5′ external duplex forming regions each has a length of about 10-50 nucleotides. In some embodiments, the 3′ and 5′ internal duplex forming regions each has a length of about 6-30 nucleotides.

[0043] In some embodiments, the IRES is selected from Table 17, or is a functional fragment or variant thereof. In some embodiments, the IRES has a sequence of an IRES from Taura syndrome virus, Triatoma virus, Theiler's encephalomyelitis virus, Simian Virus 40, Solenopsis invicta virus 1, Rhopalosiphum padi virus, Reticuloendotheliosis virus, Human poliovirus 1, Plautia stall intestine virus, Kashmir bee virus, Human rhinovirus 2, Homalodisca coagulata virus-1, Human Immunodeficiency Virus type 1, Homalodisca coagulata virus-1, Himetobi P virus, Hepatitis C virus, Hepatitis A virus, Hepatitis GB virus, Foot and mouth disease virus, Human enterovirus 71, Equine rhinitis virus, Ectropis obliqua picorna-like virus, Encephalomyocarditis virus, Drosophila C Virus, Human coxsackievirus B3, Crucifer tobamovirus, Cricket paralysis virus, Bovine viral diarrhea virus 1, Black Queen Cell Virus, Aphid lethal paralysis virus, Avian encephalomyelitis virus, Acute bee paralysis virus, Hibiscus chlorotic ringspot virus, Classical swine fever virus, Human FGF2, Human SFTPA1, Human AML1/RUNX1, Drosophila antennapedia, Human AQP4, Human AT1R, Human BAG-1, Human BCL2, Human BiP, Human c-IAP1, Human c-myc, Human eIF4G, Mouse NDST4L, Human LEF1, Mouse HIF1 alpha, Human n.myc, Mouse Gtx, Human p27kip1, Human PDGF2/c-sis, Human p53, Human Pim-1, Mouse Rbm3, Drosophila reaper, Canine Scamper, Drosophila Ubx, Human UNR, Mouse UtrA, Human VEGF-A, Human XIAP, Drosophila hairless, S. cerevisiae TFIID, S. cerevisiae YAP1, tobacco etch virus, turnip crinkle virus, EMCV-A, EMCV-B, EMCV-Bf, EMCV-Cf, EMCV pEC9, Picobirnavirus, HCV QC64, Human Cosavirus E/D, Human Cosavirus F, Human Cosavirus JMY, Rhinovirus NAT001, HRV14, HRV89, HRVC-02, HRV-A21, Salivirus A SH1, Salivirus FHB, Salivirus NG-J1, Human Parechovirus 1, Crohivirus B, Yc-3, Rosavirus M-7, Shanbavirus A, Pasivirus A, Pasivirus A 2, Echovirus E14, Human Parechovirus 5, Aichi Virus, Hepatitis A Virus HA16, Phopivirus, CVA10, Enterovirus C, Enterovirus D, Enterovirus J, Human Pegivirus 2, GBV-C GT110, GBV-C K1737, GBV-C Iowa, Pegivirus A 1220, Pasivirus A 3, Sapelovirus, Rosavirus B, Bakunsa Virus, Tremovirus A, Swine Pasivirus 1, PLV-CHN, Pasivirus A, Sicinivirus, Hepacivirus K, Hepacivirus A, BVDV1, Border Disease Virus, BVDV2, CSFV-PK15C, SF573 Dicistrovirus, Hubei Picorna-like Virus, CRPV, Apodemus Agrarius Picornavirus, Caprine Kobuvirus, Parabovirus, Salivirus A BN5, Salivirus A BN2, Salivirus A 02394, Salivirus A GUT, Salivirus A CH, Salivirus A SZ1, Salivirus FHB, CVB3, CVB1, Echovirus 7, CVB5, EVA71, CVA3, CVA12, EV24, or an aptamer to eIF4G.

[0044] In some embodiments, the first and second polyA sequences each have a length of about 15-50 nt. In some embodiments, the first and second polyA sequences each have a length of about 20-25 nt.

[0045] In some embodiments, the circular RNA polynucleotide contains at least about 80%, at least about 90%, at least about 95%, or at least about 99% naturally occurring nucleotides. In some embodiments, the circular RNA polynucleotide consists of naturally occurring nucleotides.

[0046] In some embodiments, the expression sequence is codon optimized. In some embodiments, the circular RNA polynucleotide is optimized to lack at least one microRNA binding site present in an equivalent pre-optimized polynucleotide. In some embodiments, the circular RNA polynucleotide is optimized to lack at least one microRNA binding site capable of binding to a microRNA present in a cell within which the circular RNA polynucleotide is expressed. In some embodiments, the circular RNA polynucleotide is optimized to lack at least one endonuclease susceptible site present in an equivalent pre-optimized polynucleotide. In some embodiments, the circular RNA polynucleotide is optimized to lack at least one endonuclease susceptible site capable of being cleaved by an endonuclease present in a cell within which the endonuclease is expressed. In some embodiments, the circular RNA polynucleotide is optimized to lack at least one RNA editing susceptible site present in an equivalent pre-optimized polynucleotide.

[0047] In some embodiments, the circular RNA polynucleotide is from about 100 nt to about 10,000 nt in length. In some embodiments, the circular RNA polynucleotide is from about 100 nt to about 15,000 nt in length. In some embodiments, the circular RNA is more compact than a reference linear RNA polynucleotide having the same expression sequence as the circular RNA polynucleotide.

[0048] In some embodiments, the pharmaceutical composition has a duration of therapeutic effect in a human cell greater than or equal to that of a composition comprising a reference linear RNA polynucleotide having the same expression sequence as the circular RNA polynucleotide. In some embodiments, the reference linear RNA polynucleotide is a linear, unmodified or nucleoside-modified, fully-processed mRNA comprising a cap1 structure and a polyA tail at least 80 nt in length.

[0049] In some embodiments, the pharmaceutical composition has a duration of therapeutic effect in vivo in humans greater than that of a composition comprising a reference linear RNA polynucleotide having the same expression sequence as the circular RNA polynucleotide. In some embodiments, the pharmaceutical composition has an duration of therapeutic effect in vivo in humans of at least about 10, at least about 20, at least about 30, at least about 40, at least about 50, at least about 60, at least about 70, at least about 80, at least about 90, or at least about 100 hours.

[0050] In some embodiments, the pharmaceutical composition has a functional half-life in a human cell greater than or equal to that of a pre-determined threshold value. In some embodiments, the pharmaceutical composition has a functional half-life in vivo in humans greater than that of a pre-determined threshold value. In some embodiments, the functional half-life is determined by a functional protein assay. In some embodiments, the functional protein assay is an in vitro luciferase assay. In some embodiments, the functional protein assay comprises measuring levels of protein encoded by the expression sequence of the circular RNA polynucleotide in a patient serum or tissue sample. In some embodiments, wherein the pre-determined threshold value is the functional half-life of a reference linear RNA polynucleotide comprising the same expression sequence as the circular RNA polynucleotide. In some embodiments, the pharmaceutical composition has a functional half-life of at least about 20 hours.

[0051] In some embodiments, the pharmaceutic composition comprises a structural lipid and a PEG-modified lipid. In some embodiments, the structural lipid binds to C1q and/or promotes the binding of the transfer vehicle comprising said lipid to C1q compared to a control transfer vehicle lacking the structural lipid and/or increases uptake of C1q-bound transfer vehicle into an immune cell compared to a control transfer vehicle lacking the structural lipid. In some embodiments, the immune cell is a T cell, an NK cell, an NKT cell, a macrophage, or a neutrophil.

[0052] In some embodiments, the structural lipid is cholesterol. In some embodiments, the structural lipid is beta-sitosterol. In some embodiments, the structural lipid is not beta-sitosterol.

[0053] In some embodiments, the PEG-modified lipid is DSPE-PEG, DMG-PEG, or PEG-1. In some embodiments, the PEG-modified lipid is DSPE-PEG(2000).

[0054] In some embodiments, the pharmaceutic composition further comprises a helper lipid. In some embodiments, the helper lipid is DSPC or DOPE.

[0055] In some embodiments, the pharmaceutic composition comprises DOPE, cholesterol, and DSPE-PEG.

[0056] In some embodiments, the transfer vehicle comprises about 0.5% to about 4% PEG-modified lipids by molar ratio. In some embodiments, the transfer vehicle comprises about 1% to about 2% PEG-modified lipids by molar ratio.

[0057] In some embodiments, the transfer vehicle comprises

[0058] a. an ionizable lipid is represented by

[chemical structure]

[0059] b. DOPE,

[0060] c. cholesterol, and

[0061] d. DSPE-PEG(2000).

[0062] In some embodiments, the molar ration of ionizable lipid:DSPC:cholesterol:DSPE-PEG(2000) is 62:4:33:1.

[0063] In some embodiments, the transfer vehicle comprises

[0064] a. an ionizable lipid is represented by

[chemical structure]

[0065] b. DOPE,

[0066] c. cholesterol, and

[0067] d. DSPE-PEG(2000).

[0068] In some embodiments, the molar ration of ionizable lipid:DSPC:cholesterol:DSPE-PEG(2000) is 50:10:38.5:1.5.

[0069] In some embodiments, the transfer vehicle has a nitrogen:phosphate (N:P) ratio of about 3 to about 6.

[0070] In some embodiments, the transfer vehicle is formulated for endosomal release of the circular RNA polynucleotide.

[0071] In some embodiments, the transfer vehicle is capable of binding to APOE. In some embodiments, the transfer vehicle interacts with apolipoprotein E (APOE) less than an equivalent transfer vehicle loaded with a reference linear RNA having the same expression sequence as the circular RNA polynucleotide. In some embodiments, the exterior surface of the transfer vehicle is substantially free of APOE binding sites.

[0072] In some embodiments, the transfer vehicle has a diameter of less than about 120 nm. In some embodiments, the transfer vehicle does not form aggregates with a diameter of more than 300 nm.

[0073] In some embodiments, the transfer vehicle has an in vivo half-life of less than about 30 hours.

[0074] In some embodiments, the transfer vehicle is capable of low density lipoprotein receptor (LDLR) dependent uptake into a cell. In some embodiments, the transfer vehicle is capable of LDLR independent uptake into a cell.

[0075] In some embodiments, the pharmaceutical composition is substantially free of linear RNA.

[0076] In some embodiments, the pharmaceutical composition further comprises a targeting moiety operably connected to the transfer vehicle. In some embodiments, the targeting moiety specifically binds an immune cell antigen or indirectly. In some embodiments, the immune cell antigen is a T cell antigen. In some embodiments, the T cell antigen is selected from the group consisting of CD2, CD3, CD5, CD7, CD8, CD4, beta7 integrin, beta2 integrin, and C1q.

[0077] In some embodiments, the pharmaceutical composition further comprises an adapter molecule comprising a transfer vehicle binding moiety and a cell binding moiety, wherein the targeting moiety specifically binds the transfer vehicle binding moiety and the cell binding moiety specifically binds a target cell antigen. In some embodiments, the target cell antigen is an immune cell antigen. In some embodiments, the immune cell antigen is a T cell antigen, an NK cell, an NKT cell, a macrophage, or a neutrophil. In some embodiments, the T cell antigen is selected from the group consisting of CD2, CD3, CD5, CD7, CD8, CD4, beta7 integrin, beta2 integrin, CD25, CD39, CD73, A2a Receptor, A2b Receptor, and C1q. In some embodiments, the immune cell antigen is a macrophage antigen. In some embodiments, the macrophage antigen is selected from the group consisting of mannose receptor, CD206, and C1q.

[0078] In some embodiments, the targeting moiety is a small molecule. In some embodiments, the small molecule binds to an ectoenzyme on an immune cell, wherein the ectoenzyme is selected from the group consisting of CD38, CD73, adenosine 2a receptor, and adenosine 2b receptor. In some embodiments, the small molecule is mannose, a lectin, acivicin, biotin, or digoxigenin.

[0079] In some embodiments, the targeting moiety is a single chain Fv (scFv) fragment, nanobody, peptide, peptide-based macrocycle, minibody, small molecule ligand such as folate, arginylglycylaspartic acid (RGD), or phenol-soluble modulin alpha 1 peptide (PSMA1), heavy chain variable region, light chain variable region or fragment thereof.

[0080] In some embodiments, the ionizable lipid has a half-life in a cell membrane less than about 2 weeks. In some embodiments, the ionizable lipid has a half-life in a cell membrane less than about 1 week. In some embodiments, the ionizable lipid has a half-life in a cell membrane less than about 30 hours. In some embodiments, the ionizable lipid has a half-life in a cell membrane less than the functional half-life of the circular RNA polynucleotide.

[0081] In another aspect, the present application provides a method of treating or preventing a disease, disorder, or condition, comprising administering an effective amount of a pharmaceutical composition disclosed herein. In some embodiments, the disease, disorder, or condition is associated with aberrant expression, activity, or localization of a polypeptide selected from Tables 27 or 28. In some embodiments, the circular RNA polynucleotide encodes a therapeutic protein. In some embodiments, therapeutic protein expression in the spleen is higher than therapeutic protein expression in the liver. In some embodiments, therapeutic protein expression in the spleen is at least about 2.9× therapeutic protein expression in the liver. In some embodiments, the therapeutic protein is not expressed at functional levels in the liver. In some embodiments, the therapeutic protein is not expressed at detectable levels in the liver. In some embodiments, therapeutic protein expression in the spleen is at least about 63% of total therapeutic protein expression.

[0082] In another aspect, the present application provides a linear RNA polynucleotide comprising, from 5′ to 3′, a 3′ group I intron fragment, an Internal Ribosome Entry Site (IRES), an expression sequence, and a 5′ group I intron fragment, further comprising a first spacer 5′ to the 3′ group I intron fragment and/or a second spacer 3′ to the 5′ group I intron fragment.

[0083] In some embodiments, the linear RNA polynucleotide comprises a first spacer 5′ to the 3′ group I intron fragment. In some embodiments, the first spacer has a length of 10-50 nucleotides, optionally 10-20 nucleotides, further optionally about 15 nucleotides. In some embodiments, the first spacer comprises a polyA sequence.

[0084] In some embodiments, the linear RNA polynucleotide comprises a second spacer 3′ to the 5′ group I intron fragment. In some embodiments, the second spacer has a length of 10-50 nucleotides, optionally 10-20 nucleotides, further optionally about 15 nucleotides. In some embodiments, the second spacer comprises a polyA sequence.

[0085] In some embodiments, the linear RNA polynucleotide further comprises a third spacer between the 3′ group I intron fragment and IRES. In some embodiments, the third spacer has a length of about 10 to about 60 nucleotides. In some embodiments, the linear RNA polynucleotide further comprises a first and a second duplex forming regions capable of forming a duplex. In some embodiments, the first and second duplex forming regions each have a length of about 9 to 19 nucleotides. In some embodiments, the first and second duplex forming regions each have a length of about 30 nucleotides.

[0086] In some embodiments, the linear RNA polynucleotide has enhanced expression, circularization efficiency, functional stability, and/or stability as compared to a reference linear RNA polynucleotide, wherein the reference linear RNA polynucleotide comprises, from 5′ to 3′, a first polyA sequence, a 5′ external spacer, a 3′ group I intron fragment, a 5′ internal spacer comprising a 5′ internal duplex forming region, an IRES, an expression sequence, a stop condon, a 3′ internal spacer comprising a 3′ internal duplex forming region, a 5′ group I intron fragment, a 3′ external spacer, and a second polyA sequence.

[0087] In some embodiments, the linear RNA polynucleotide has enhanced expression, circularization efficiency, functional stability, and/or stability as compared to a reference linear RNA polynucleotide, wherein the reference linear RNA polynucleotide comprises, from 5′ to 3′, a reference 3′ group I intron fragment, a reference IRES, a reference expression sequence, and a reference 5′ group I intron fragment, and does not comprise a spacer 5′ to the 3′ group I intron fragment or a spacer 3′ to the 5′ group I intron fragment. In some embodiments, the expression sequence and the reference expression sequence have the same sequence. In some embodiments, the IRES and the reference IRES have the same sequence.

[0088] In some embodiments, the linear RNA polynucleotide comprises a 3′ Anabaena group I intron fragment and a 5′ Anabaena group I intron fragment. In some embodiments, the reference RNA polynucleotide comprises a reference 3′ Anabaena group I intron fragment and a reference 5′ Anabaena group I intron fragment. In some embodiments, the reference 3′ Anabaena group I intron fragment and reference 5′ Anabaena group I intron fragment were generated using the L6-5 permutation site. In some embodiments, the 3′ Anabaena group I intron fragment and 5′ Anabaena group I intron fragment were not generated using the L6-5 permutation site. In some embodiments, the 3′ Anabaena group I intron fragment comprises or consists of a sequence selected from SEQ ID NO: 112-123 and 125-150. In some embodiments, the 5′ Anabaena group I intron fragment comprises a corresponding sequence selected from SEQ ID NO: 73-84 and 86-111. In some embodiments, the 5′ Anabaena group I intron fragment comprises or consists of a sequence selected from SEQ ID NO: 73-84 and 86-111. In some embodiments, the 3′ Anabaena group I intron fragment comprises or consists of a corresponding sequence selected from SEQ ID NO: 112-124 and 125-150.

[0089] In some embodiments, the IRES comprises a nucleotide sequence selected from SEQ ID NOs: 348-351. In some embodiments, the reference IRES is CVB3. In some embodiments, the IRES is not CVB3. In some embodiments, the IRES comprises a sequence selected from SEQ ID NOs: 1-64 and 66-72.

[0090] In another aspect, the present application discloses a circular RNA polynucleotide produced from the linear RNA disclosed herein.

[0091] In another aspect, the present application discloses a circular RNA comprising, from 5′ to 3′, a 3′ group I intron fragment, an IRES, an expression sequence, and a 5′ group I intron fragment, wherein the IRES comprises a nucleotide sequence selected from SEQ ID NOs: 348-351.

[0092] In some embodiments, the circular RNA polynucleotide further comprises a spacer between the 3′ group I intron fragment and the IRES.

[0093] In some embodiments, the circular RNA polynucleotide further comprises a first and a second duplex forming regions capable of forming a duplex. In some embodiments, the first and second duplex forming regions each have a length of about 9 to 19 nucleotides. In some embodiments, the first and second duplex forming regions each have a length of about 30 nucleotides.

[0094] In some embodiments, the expression sequence has a size of at least about 1,000 nt, at least about 2,000 nt, at least about 3,000 nt, at least about 4,000 nt, or at least about 5,000 nt.

[0095] In some embodiments, the RNA polynucleotide comprises natural nucleotides. In some embodiments, the expression sequence is codon optimized. In some embodiments, the RNA polynucleotide further comprises a translation termination cassette comprising at least one stop codon in each reading frame. In some embodiments, the translation termination cassette comprises at least two stop codons in the reading frame of the expression sequence. In some embodiments, the RNA polynucleotide is optimized to lack at least one microRNA binding site present in an equivalent pre-optimized polynucleotide. In some embodiments, the RNA polynucleotide is optimized to lack at least one endonuclease susceptible site present in an equivalent pre-optimized polynucleotide. In some embodiments, the RNA polynucleotide is optimized to lack at least one RNA editing susceptible site present in an equivalent pre-optimized polynucleotide.

[0096] In some embodiments, the RNA polynucleotide comprises at least 2 expression sequences. In some embodiments, each expression sequence encodes a different therapeutic protein.

[0097] In some embodiments, a circular RNA polynucleotide disclosed herein is from about 100 to 15,000 nucleotides, optionally about 100 to 12,000 nucleotides, further optionally about 100 to 10,000 nucleotides in length.

[0098] In some embodiments, a circular RNA polynucleotide disclosed herein has an in vivo duration of therapeutic effect in humans of at least about 20 hours. In some embodiments, a circular RNA polynucleotide disclosed herein has a functional half-life of at least about 20 hours. In some embodiments, the circular RNA polynucleotide has a duration of therapeutic effect in a human cell greater than or equal to that of an equivalent linear RNA polynucleotide comprising the same expression sequence. In some embodiments, the circular RNA polynucleotide has a functional half-life in a human cell greater than or equal to that of an equivalent linear RNA polynucleotide comprising the same expression sequence. In some embodiments, the circular RNA polynucleotide has an in vivo duration of therapeutic effect in humans greater than that of an equivalent linear RNA polynucleotide having the same expression sequence. In some embodiments, the circular RNA polynucleotide has an in vivo functional half-life in humans greater than that of an equivalent linear RNA polynucleotide having the same expression sequence.

[0099] In another aspect, the present disclosure provides a composition comprising a circular RNA polynucleotide disclosed herein, a nanoparticle, and optionally, a targeting moiety operably connected to the nanoparticle. In some embodiments, the nanoparticle is a lipid nanoparticle, a core-shell nanoparticle, a biodegradable nanoparticle, a biodegradable lipid nanoparticle, a polymer nanoparticle, or a biodegradable polymer nanoparticle. In some embodiments, the pharmaceutical composition comprises a targeting moiety, wherein the targeting moiety mediates receptor-mediated endocytosis or direct fusion selectively into cells of a selected cell population or tissue in the absence of cell isolation or purification. In some embodiments, the targeting moiety is a scfv, nanobody, peptide, minibody, polynucleotide aptamer, heavy chain variable region, light chain variable region or fragment thereof. In some embodiments, wherein less than 1%, by weight, of the polynucleotides in the composition are double stranded RNA, DNA splints, or triphosphorylated RNA. In some embodiments, less than 1%, by weight, of the polynucleotides and proteins in the pharmaceutical composition are double stranded RNA, DNA splints, triphosphorylated RNA, phosphatase proteins, protein ligases, and capping enzymes.

[0100] In another aspect, the present disclosure provides a method of treating a subject in need thereof comprising administering a therapeutically effective amount of a composition comprising the circular RNA polynucleotide disclosed herein, a nanoparticle, and optionally, a targeting moiety operably connected to the nanoparticle.

[0101] In another aspect, the present disclosure provides a method of treating a subject in need thereof comprising administering a therapeutically effective amount of the pharmaceutical composition disclosed herein. In some embodiments, the targeting moiety is an scfv, nanobody, peptide, minibody, heavy chain variable region, light chain variable region, an extracellular domain of a TCR, or a fragment thereof. In some embodiments, the nanoparticle is a lipid nanoparticle, a core-shell nanoparticle, or a biodegradable nanoparticle. In some embodiments, the nanoparticle comprises one or more cationic lipids, ionizable lipids, or poly β-amino esters. In some embodiments, the nanoparticle comprises one or more non-cationic lipids. In some embodiments, the nanoparticle comprises one or more PEG-modified lipids, polyglutamic acid lipids, or Hyaluronic acid lipids. In some embodiments, the nanoparticle comprises cholesterol. In some embodiments, the nanoparticle comprises arachidonic acid or oleic acid.

[0102] In some embodiments, a provided pharmaceutical composition comprises a targeting moiety, wherein the targeting moiety mediates receptor-mediated endocytosis selectively into cells of a selected cell population in the absence of cell selection or purification.

[0103] In some embodiments, a provided nanoparticle comprises more than one circular RNA polynucleotide.

[0104] In another aspect, the present application provides a DNA vector encoding the RNA polynucleotide disclosed herein. In some embodiments, the DNA vector further comprises a transcription regulatory sequence. In some embodiments, the transcription regulatory sequence comprises a promoter and/or an enhancer. In some embodiments, the promoter comprises a T7 promoter. In some embodiments, the DNA vector comprises a circular DNA. In some embodiments, the DNA vector comprises a linear DNA.

[0105] In another aspect, the present application provides a prokaryotic cell comprising the DNA vector disclosed herein.

[0106] In another aspect, the present application provides a eukaryotic cell comprising the circular RNA polynucleotide disclosed herein. In some embodiments, the eukaryotic cell is a human cell.

[0107] In another aspect, the present application provides a method of producing a circular RNA polynucleotide, the method comprising incubating the linear RNA polynucleotide disclosed herein under suitable conditions for circularization. In some embodiments, the method comprises incubating the DNA disclosed herein under suitable conditions for transcription. In some embodiments, the DNA is transcribed in vitro. In some embodiments, the suitable conditions comprises adenosine triphosphate (ATP), guanine triphosphate (GTP), cytosine triphosphate (CTP), uridine triphosphate (UTP), and an RNA polymerase. In some embodiments, the suitable conditions further comprises guanine monophosphate (GMP). In some embodiments, the ratio of GMP concentration to GTP concentration is within the range of about 3:1 to about 15:1, optionally about 4:1, 5:1, or 6:1.

[0108] In another aspect, the present application provides a method of producing a circular RNA polynucleotide, the method comprising culturing the prokaryotic cell disclosed herein under suitable conditions for transcribing the DNA in the cell. In some embodiments, the method further comprising purifying a circular RNA polynucleotide. In some embodiments, the circular RNA polynucleotide is purified by negative selection using an affinity oligonucleotide that hybridizes with the first or second spacer conjugated to a solid surface. In some embodiments, the first or second spacer comprises a polyA sequence, and wherein the affinity oligonucleotide is a deoxythymine oligonucleotide.

### BRIEF DESCRIPTION OF THE DRAWINGS

[0109] FIG. 1 depicts luminescence in supernatants of HEK293 (FIGS. 1A, 1D, and 1E), HepG2 (FIG. 1B), or 1C1C7 (FIG. 1C) cells 24 hours after transfection with circular RNA comprising a Gaussia luciferase expression sequence and various IRES sequences.

[0110] FIG. 2 depicts luminescence in supernatants of HEK293 (FIG. 2A), HepG2 (FIG. 2B), or 1C1C7 (FIG. 2C) cells 24 hours after transfection with circular RNA comprising a Gaussia luciferase expression sequence and various IRES sequences having different lengths.

[0111] FIG. 3 depicts stability of select IRES constructs in HepG2 (FIG. 3A) or 1C1C7 (FIG. 3B) cells over 3 days as measured by luminescence.

[0112] FIGS. 4A and 4B depict protein expression from select IRES constructs in Jurkat cells, as measured by luminescence from secreted Gaussia luciferase in cell supernatants.

[0113] FIGS. 5A and 5B depict stability of select IRES constructs in Jurkat cells over 3 days as measured by luminescence.

[0114] FIG. 6 depicts comparisons of 24 hour luminescence (FIG. 6A) or relative luminescence over 3 days (FIG. 6B) of modified linear, unpurified circular, or purified circular RNA encoding Gaussia luciferase.

[0115] FIG. 7 depicts transcript induction of IFNγ (FIG. 7A), IL-6 (FIG. 7B), IL-2 (FIG. 7C), RIG-I (FIG. 7D), IFN-β1 (FIG. 7E), and TNFα (FIG. 7F) after electroporation of Jurkat cells with modified linear, unpurified circular, or purified circular RNA.

[0116] FIG. 8 depicts a comparison of luminescence of circular RNA and modified linear RNA encoding Gaussia luciferase in human primary monocytes (FIG. 8A) and macrophages (FIG. 8B and FIG. 8C).

[0117] FIG. 9 depicts relative luminescence over 3 days (FIG. 9A) in supernatant of primary T cells after transduction with circular RNA comprising a Gaussia luciferase expression sequence and varying IRES sequences or 24 hour luminescence (FIG. 9B).

[0118] FIG. 10 depicts 24 hour luminescence in supernatant of primary T cells (FIG. 10A) after transduction with circular RNA or modified linear RNA comprising a Gaussia luciferase expression sequence, or relative luminescence over 3 days (FIG. 10B), and 24 hour luminescence in PBMCs (FIG. 10C).

[0119] FIG. 11 depicts HPLC chromatograms (FIG. 11A) and circularization efficiencies (FIG. 11B) of RNA constructs having different permutation sites.

[0120] FIG. 12 depicts HPLC chromatograms (FIG. 12A) and circularization efficiencies (FIG. 12B) of RNA constructs having different introns and/or permutation sites.

[0121] FIG. 13 depicts HPLC chromatograms (FIG. 13A) and circularization efficiencies (FIG. 13B) of 3 RNA constructs with or without homology arms.

[0122] FIG. 14 depicts circularization efficiencies of 3 RNA constructs without homology arms or with homology arms having various lengths and GC content.

[0123] FIGS. 15A and 15B depict HPLC HPLC chromatograms showing the contribution of strong homology arms to improved splicing efficiency, the relationship between circularization efficiency and nicking in select constructs, and combinations of permutations sites and homology arms hypothesized to demonstrate improved circularization efficiency.

[0124] FIG. 16 shows fluorescent images of T cells mock electroporated (left) or electroporated with circular RNA encoding a CAR (right) and co-cultured with Raji cells expressing GFP and firefly luciferase.

[0125] FIG. 17 shows bright field (left), fluorescent (center), and overlay (right) images of T cells mock electroporated (top) or electroporated with circular RNA encoding a CAR (bottom) and co-cultured with Raji cells expressing GFP and firefly luciferase.

[0126] FIG. 18 depicts specific lysis of Raji target cells by T cells mock electroporated or electroporated with circular RNA encoding different CAR sequences.

[0127] FIG. 19 depicts luminescence in supernatants of Jurkat cells (left) or resting primary human CD3+ T cells (right) 24 hours after transduction with linear or circular RNA comprising a Gaussia luciferase expression sequence and varying IRES sequences (FIG. 19A), and relative luminescence over 3 days (FIG. 19B).

[0128] FIG. 20 depicts transcript induction of IFN-β1 (FIG. 20A), RIG-I (FIG. 20B), IL-2 (FIG. 20C), IL-6 (FIG. 20D), IFNγ (FIG. 20E), and TNFα (FIG. 20F) after electroporation of human CD3+ T cells with modified linear, unpurified circular, or purified circular RNA.

[0129] FIG. 21 depicts specific lysis of Raji target cells by human primary CD3+ T cells electroporated with circRNA encoding a CAR as determined by detection of firefly luminescence (FIG. 21A), and IFNγ transcript induction 24 hours after electroporation with different quantities of circular or linear RNA encoding a CAR sequence (FIG. 21B).

[0130] FIG. 22 depicts specific lysis of target or non-target cells by human primary CD3+ T cells electroporated with circular or linear RNA encoding a CAR at different E:T ratios (FIG. 22A and FIG. 22B) as determined by detection of firefly luminescence.

[0131] FIG. 23 depicts specific lysis of target cells by human CD3+ T cells electroporated with RNA encoding a CAR at 1, 3, 5, and 7 days post electroporation.

[0132] FIG. 24 depicts specific lysis of target cells by human CD3+ T cells electroporated with circular RNA encoding a CD19 or BCMA targeted CAR.

[0133] FIG. 25 depicts total Flux of organs harvested from CD-1 mice dosed with circular RNA encoding FLuc and formulated with 50% Lipid 15 (Table 10b), 10% DSPC, 1.5% PEG-DMG, and 38.5% cholesterol.

[0134] FIG. 26 shows images highlighting the luminescence of organs harvested from CD-1 mice dosed with circular RNA encoding FLuc and formulated with 50% Lipid 15 (Table 10b), 10% DSPC, 1.5% PEG-DMG, and 38.5% cholesterol.

[0135] FIG. 27 depicts molecular characterization of Lipids 26 and 27 from Table 10a.

[0136] FIG. 27A shows the proton nuclear magnetic resonance (NMR) spectrum of Lipid 26.

[0137] FIG. 27B shows the retention time of Lipid 26 measured by liquid chromatography-mass spectrometry (LC-MS). FIG. 27C shows the mass spectrum of Lipid 26. FIG. 27D shows the proton NMR spectrum of Lipid 27. FIG. 27E shows the retention time of Lipid 27 measured by LC-MS. FIG. 27F shows the mass spectrum of Lipid 27.

[0138] FIG. 28 depicts molecular characterization of Lipid 22-S14 and its synthetic intermediates. FIG. 28A depicts the NMR spectrum of 2-(tetradecylthio)ethan-1-ol. FIG. 28B depicts the NMR spectrum of 2-(tetradecylthio)ethyl acrylate. FIG. 28C depicts the NMR spectrum of bis(2-(tetradecylthio)ethyl) 3,3′-((3-(2-methyl-1H-imidazol-1-yl)propyl)azanediyl)dipropionate (Lipid 22-S14).

[0139] FIG. 29 depicts the NMR spectrum of bis(2-(tetradecylthio)ethyl) 3,3′-((3-(1H-imidazol-1-yl)propyl) azanediyl)dipropionate (Lipid 93-S 14).

[0140] FIG. 30 depicts molecular characterization of heptadecan-9-yl 8-((3-(2-methyl-1H-imidazol-1-yl)propyl)(8-(nonyloxy)-8-oxooctyl)amino)octanoate (Lipid 54 from Table 10a). FIG. 30A shows the proton NMR spectrum of Lipid 54. FIG. 30B shows the retention time of Lipid 54 measured by LC-MS. FIG. 30C shows the mass spectrum of Lipid 54.

[0141] FIG. 31 depicts molecular characterization of heptadecan-9-yl 8-((3-(1H-imidazol-1-yl)propyl)(8-(nonyloxy)-8-oxooctyl)amino)octanoate (Lipid 53 from Table 10a).

[0142] FIG. 31A shows the proton NMR spectrum of Lipid 53. FIG. 31B shows the retention time of Lipid 53 measured by LC-MS. FIG. 31C shows the mass spectrum of Lipid 53.

[0143] FIG. 32A depicts total flux of spleen and liver harvested from CD-1 mice dosed with circular RNA encoding firefly luciferase (FLuc) and formulated with ionizable lipid of interest, DSPC, cholesterol, and DSPE-PEG 2000 (Avanti Polar Lipids Inc.) at a weight ratio of 16:1:4:1 or 62:4:33:1 molar ratio. FIG. 32B depicts average radiance for biodistribution of protein expression.

[0144] FIG. 33A depicts images highlighting the luminescence of organs harvested from CD-1 mice dosed with circular RNA encoding FLuc and formulated with ionizable Lipid 22-S14, DSPC, cholesterol, and DSPE-PEG 2000 (Avanti Polar Lipids Inc.) at a weight ratio of 16:1:4:1 or 62:4:33:1 molar ratio. FIG. 33B depicts whole body IVIS images of CD-1 mice dosed with circular RNA encoding FLuc and formulated with ionizable Lipid 22-S14, DSPC, cholesterol, and DSPE-PEG 2000 (Avanti Polar Lipids Inc.) at a weight ratio of 16:1:4:1 or 62:4:33:1 molar ratio.

[0145] FIG. 34A depicts images highlighting the luminescence of organs harvested from CD-1 mice dosed with circular RNA encoding FLuc and formulated with ionizable Lipid 93-S14, DSPC, cholesterol, and DSPE-PEG 2000 (Avanti Polar Lipids Inc.) at a weight ratio of 16:1:4:1 or 62:4:33:1 molar ratio. FIG. 34B depicts whole body IVIS images of CD-1 mice dosed with circular RNA encoding FLuc and formulated with ionizable Lipid 93-S14, DSPC, cholesterol, and DSPE-PEG 2000 (Avanti Polar Lipids Inc.) at a weight ratio of 16:1:4:1 or 62:4:33:1 molar ratio.

[0146] FIG. 35A depicts images highlighting the luminescence of organs harvested from CD-1 mice dosed with circular RNA encoding FLuc and formulated with ionizable Lipid 26 from Table 10a, DSPC, cholesterol, and DSPE-PEG 2000 (Avanti Polar Lipids Inc.) at a weight ratio of 16:1:4:1 or 62:4:33:1 molar ratio. FIG. 35B depicts whole body IVIS images of CD-1 mice dosed with circular RNA encoding FLuc and formulated with ionizable Lipid 26, DSPC, cholesterol, and DSPE-PEG 2000 (Avanti Polar Lipids Inc.) at a weight ratio of 16:1:4:1 or 62:4:33:1 molar ratio.

[0147] FIG. 36 depicts images highlighting the luminescence of organs harvested from c57BL/6J mice dosed with circular RNA encoding FLuc and encapsulated in lipid nanoparticles formed with Lipid 15 from Table 10b (FIG. 36A), Lipid 53 from Table 10a (FIG. 36B), or Lipid 54 from Table 10a (FIG. 36C). PBS was used as control (FIG. 36D).

[0148] FIGS. 37A and 37B depict relative luminescence in the lysates of human PBMCs after 24-hour incubation with testing lipid nanoparticles containing circular RNA encoding firefly luciferase.

[0149] FIGS. 38A and 38B show the expression of GFP (FIG. 38A) and CD19 CAR (FIG. 38B) in human PBMCs after incubating with testing lipid nanoparticle containing circular RNA encoding either GFP or CD19 CAR.

[0150] FIG. 39 depicts the expression of an anti-murine CD19 CAR in 1C1C7 cells lipotransfected with circular RNA comprising an anti-murine CD19 CAR expression sequence and varying IRES sequences.

[0151] FIG. 40 shows the cytotoxicity of an anti-murine CD19 CAR to murine T cells. The CD19 CAR is encoded by and expressed from a circular RNA, which is electroporated into the murine T cells.

[0152] FIGS. 41A, 41B and 41C depict the B cell counts in peripheral blood (FIGS. 41A and 41B) or spleen (FIG. 41C) in C57BL/6J mice injected every other day with testing lipid nanoparticles encapsulating a circular RNA encoding an anti-murine CD19 CAR.

[0153] FIGS. 42A and 42B compares the expression level of an anti-human CD19 CAR expressed from a circular RNA with that expressed from a linear mRNA.

[0154] FIGS. 43A and 43B compares the cytotoxic effect of an anti-human CD19 CAR expressed from a circular RNA with that expressed from a linear mRNA

[0155] FIG. 44 depicts the cytotoxicity of two CARs (anti-human CD19 CAR and anti-human BCMA CAR) expressed from a single circular RNA in T cells.

[0156] FIG. 45A shows representative FACS plots with frequencies of tdTomato expression in various spleen immune cell subsets following treatment with LNPs formed with Lipid 27 or 26 from Table 10a or Lipid 15 from Table 10b. FIG. 45B shows the quantification of the proportion of myeloid cells, B cells, and T cells expressing tdTomato (mean+std. dev., n=3), equivalent to the proportion of each cell population successfully transfected with Cre circular RNA. FIG. 45C illustrates the proportion of additional splenic immune cell populations, including NK cells, classical monocytes, nonclassical monocytes, neutrophils, and dendritic cells, expressing tdTomato after treatment with Lipids 27 and 26 (mean+std. dev., n=3).

[0157] FIG. 46A depicts an exemplary RNA construct design with built-in polyA sequences in the introns. FIG. 46B shows the chromatography trace of unpurified circular RNA. FIG. 46C shows the chromatography trace of affinity-purified circular RNA. FIG. 46D shows the immunogenicity of the circular RNAs prepared with varying IVT conditions and purification methods. (Commercial=commercial IVT mix; Custom=customerized IVT mix; Aff=affinity purification; Enz=enzyme purification; GMP:GTP ratio=8, 12.5, or 13.75).

[0158] FIG. 47A depicts an exemplary RNA construct design with a dedicated binding sequence as an alternative to polyA for hybridization purification. FIG. 47B shows the chromatography trace of unpurified circular RNA. FIG. 46C shows the chromatography trace of affinity-purified circular RNA.

[0159] FIG. 48A shows the chromatography trace of unpurified circular RNA encoding dystrophin. FIG. 48B shows the chromatography trace of enzyme-purified circular RNA encoding dystrophin.

[0160] FIG. 49 compares the expression (FIG. 49A) and stability (FIG. 49B) of purified circRNAs with different 5′ spacers between the 3′ intron fragment/5′ internal duplex region and the IRES in Jurkat cells. (AC=only A and C were used in the spacer sequence; UC=only U and C were used in the spacer sequence.)

[0161] FIG. 50 shows luminescence expression levels and stability of expression in primary T cells from circular RNAs containing the original or modified IRES elements indicated.

[0162] FIG. 51 shows luminescence expression levels and stability of expression in HepG2 cells from circular RNAs containing the original or modified IRES elements indicated.

[0163] FIG. 52 shows luminescence expression levels and stability of expression in 1C1C7 cells from circular RNAs containing the original or modified IRES elements indicated.

[0164] FIG. 53 shows luminescence expression levels and stability of expression in HepG2 cells from circular RNAs containing IRES elements with untranslated regions (UTRs) inserted or hybrid IRES elements. “Scr” means Scrambled, which was used as a control.

[0165] FIG. 54 shows luminescence expression levels and stability of expression in 1C1C7 cells from circular RNAs containing an IRES and variable stop codon cassettes operably linked to a Gaussia luciferase coding sequence.

[0166] FIG. 55 shows luminescence expression levels and stability of expression in 1C1C7 cells from circular RNAs containing an IRES and variable untranslated regions (UTRs) inserted before the start codon of a Gaussian luciferase coding sequence.

[0167] FIG. 56 shows expression levels of human erythropoietin (hEPO) in Huh7 cells from circular RNAs containing two miR-122 target sites downstream from the hEPO coding sequence.

### DETAILED DESCRIPTION

[0168] Provided herein are pharmaceutical compositions and transfer vehicles, e.g., lipid nanoparticles, comprising circular RNA. The circular RNA provided herein may be delivered and/or targeted to a cell in a transfer vehicle, e.g., a nanoparticle, or a composition comprising a transfer vehicle. In some embodiments, the circular RNA may also be delivered to a subject in a transfer vehicle or a composition comprising a transfer vehicle. In some embodiments, the transfer vehicle is a nanoparticle. In some embodiments, the nanoparticle is a lipid nanoparticle, a polymeric core-shell nanoparticle, or a biodegradable nanoparticle. In some embodiments, the nanoparticle is a lipid nanoparticle. In some embodiments, the transfer vehicle comprises one or more ionizable lipids, PEG modified lipids, helper lipids, and/or structural lipids.

[0169] In some embodiments, a transfer vehicle encapsulates circular RNA and comprises an ionizable lipid, a structural lipid, and a PEG-modified lipid. In some embodiments, a transfer vehicle encapsulates circular RNA and comprises an ionizable lipid, a structural lipid, a PEG-modified lipid, and a helper lipid.

[0170] In some embodiments, the transfer vehicle comprises an ionizable lipid described herein. In some embodiments, the transfer vehicle comprises an ionizable lipid shown in any one of Tables 1-10, 10a, 10b, 11-15, and 15b. In some embodiments, the transfer vehicle comprises an ionizable lipid shown in Table 10a.

[0171] In some embodiments, the RNA in a transfer vehicle is at least about 80%, 85%, 90%, 91%, 92%, 93%, 94%, 95%, 96%, 97%, 98%, 99%, 99.5%, 99.9%, or more circular RNA. In some embodiments, less than 5%, 10%, 15%, 20%, 25%, 30%, 35%, 40%, 45%, 50%, 55%, 60%, 65%, or 70% of loaded RNA is on or associated with a transfer vehicle exterior surface.

[0172] In some embodiments, the transfer vehicle is capable of binding to APOE. In some embodiments, the surface of the transfer vehicle comprises APOE binding sites. In some embodiments, the surface of the transfer vehicle is substantially free of APOE binding sites. In some embodiments, a transfer vehicle interacts with APOE less than an equivalent transfer vehicle loaded with linear RNA. In some embodiments, APOE interaction may be measured by comparing nanoparticle uptake in cells in APO depleted serum or APO complement serum.

[0173] Without wishing to be bound by theory, it is contemplated that transfer vehicles comprising APOE binding sites deliver circular RNAs more efficiently to the liver. Accordingly, in some embodiments, the transfer vehicle comprising the ionizable lipids described herein and loaded with circular RNA substantially comprises APOE binding sites on the transfer vehicle surface, thereby delivering the circular RNA to the liver at a higher efficiency compared to a transfer vehicle substantially lacking APOE binding sites on the surface. In some embodiments, the transfer vehicle comprising the ionizable lipids described herein and loaded with circular RNA substantially lacks APOE binding sites on the transfer vehicle surface, thereby delivering the circular RNA to the liver at a lower efficiency compared to a transfer vehicle comprising APOE binding sites on the surface.

[0174] In some embodiments, the transfer vehicle delivers, or is capable of delivering, circular RNA to the spleen. In some embodiments, a circular RNA encodes a therapeutic protein. In some embodiments, at least about 10%, 15%, 20%, 25%, 30%, 35%, 40%, 45%, 50%, 55%, 60%, 65%, 70%, 75%, 80%, 85%, 90%, 95%, or 99% of the total therapeutic protein expressed in the subject is expressed in the spleen. In some embodiments, more therapeutic protein is expressed in the spleen than in the liver (e.g., 2×, 3×, 4×, or 5× more). In some embodiments, the lipid nanoparticle has an ionizable lipid:phosphate ratio of 3-7. In some embodiments, the lipid nanoparticle has an ionizable lipid:phosphate ratio of 4-6. In some embodiments, the lipid nanoparticle has an ionizable lipid:phosphate ratio of 4.5. In some embodiments, the lipid nanoparticle has an nitrogen:phosphate (N:P) ratio of 3-6. In some embodiments, the lipid nanoparticle has an N:P ratio of 5-6. In some embodiments, the lipid nanoparticle has an N:P ratio of 5.7. In some embodiments, expression of a nonsecreted protein may be measured using an ELISA, normalizing to tissue weight.

[0175] Without wishing to be bound by theory, it is thought that transfer vehicles described herein shield encapsulated circular RNA from degradation and provide for effective delivery of circular RNA to target cells in vivo and in vitro.

[0176] Embodiments of the present disclosure provide lipid compositions described according to the respective molar ratios of the component lipids in the formulation. In one embodiment, the mol-% of the ionizable lipid may be from about 10 mol-% to about 80 mol-%. In one embodiment, the mol-% of the ionizable lipid may be from about 20 mol-% to about 70 mol-%. In one embodiment, the mol-% of the ionizable lipid may be from about 30 mol-% to about 60 mol-%. In one embodiment, the mol-% of the ionizable lipid may be from about 35 mol-% to about 55 mol-%. In one embodiment, the mol-% of the ionizable lipid may be from about 40 mol-% to about 50 mol-%. In some embodiments, the ionizable lipid mol-% of the transfer vehicle batch will be ±30%, ±25%, ±20%, ±15%, ±10%, ±5%, or ±2.5% of the target mol-%. In certain embodiments, transfer vehicle inter-lot variability will be less than 15%, less than 10% or less than 5%.

[0177] In one embodiment, the mol-% of the helper lipid may be from about 1 mol-% to about 50 mol-%. In one embodiment, the mol-% of the helper lipid may be from about 2 mol-% to about 45 mol-%. In one embodiment, the mol-% of the helper lipid may be from about 3 mol-% to about 40 mol-%. In one embodiment, the mol-% of the helper lipid may be from about 4 mol-% to about 35 mol-%. In one embodiment, the mol-% of the helper lipid may be from about 5 mol-% to about 30 mol-%. In one embodiment, the mol-% of the helper lipid may be from about 10 mol-% to about 20 mol-%. In some embodiments, the helper lipid mol-% of the transfer vehicle batch will be ±30%, ±25%, ±20%, ±15%, ±10%, ±5%, or ±2.5% of the target mol-%.

[0178] In one embodiment, the mol-% of the structural lipid may be from about 10 mol-% to about 80 mol-%. In one embodiment, the mol-% of the structural lipid may be from about 20 mol-% to about 70 mol-%. In one embodiment, the mol-% of the structural lipid may be from about 30 mol-% to about 60 mol-%. In one embodiment, the mol-% of the structural lipid may be from about 35 mol-% to about 55 mol-%. In one embodiment, the mol-% of the structural lipid may be from about 40 mol-% to about 50 mol-%. In some embodiments, the structural lipid mol-% of the transfer vehicle batch will be ±30%, ±25%, ±20%, ±15%, ±10%, ±5%, or ±2.5% of the target mol-%.

[0179] In one embodiment, the mol-% of the PEG modified lipid may be from about 0.1 mol-% to about 10 mol-%. In one embodiment, the mol-% of the PEG modified lipid may be from about 0.2 mol-% to about 5 mol-%. In one embodiment, the mol-% of the PEG modified lipid may be from about 0.5 mol-% to about 3 mol-%. In one embodiment, the mol-% of the PEG modified lipid may be from about 1 mol-% to about 2 mol-%. In one embodiment, the mol-% of the PEG modified lipid may be about 1.5 mol-%. In some embodiments, the PEG modified lipid mol-% of the transfer vehicle batch will be ±30%, ±25%, +20%, ±15%, ±10%, ±5%, or ±2.5% of the target mol-%.

[0180] Also contemplated are pharmaceutical compositions, and in particular transfer vehicles, that comprise one or more of the compounds disclosed herein. In certain embodiments, such transfer vehicles comprise one or more of PEG-modified lipids, an ionizable lipid, a helper lipid, and/or a structural lipid disclosed herein. Also contemplated are transfer vehicles that comprise one or more of the compounds disclosed herein and that further comprise one or more additional lipids. In certain embodiments, such transfer vehicles are loaded with or otherwise encapsulate circular RNA.

[0181] Transfer vehicles of the invention encapsulate circular RNA. In certain embodiments, the polynucleotides encapsulated by the compounds or pharmaceutical and liposomal compositions of the invention include RNA encoding a protein or enzyme (e.g., circRNA encoding, for example, phenylalanine hydroxylase (PAH)). The present invention contemplates the use of such polynucleotides as a therapeutic that is capable of being expressed by target cells to thereby facilitate the production (and in certain instances, the excretion) of a functional enzyme or protein as disclosed bu such target cells, for example, in International Application No. PCT/US2010/058457 and in U.S. Provisional Application No. 61/494,881, filed Jun. 8, 2011, the teachings of which are both incorporated herein by reference in their entirety. For example, in certain embodiments, upon the expression of one or more polynucleotides by target cells, the production of a functional enzyme or protein in which a subject is deficient (e.g., a urea cycle enzyme or an enzyme associated with a lysosomal storage disorder) may be observed. As another example, circular RNA encapsulated by a transfer vehicle may encode one or both polypeptide chains of a T cell receptor protein or encode a chimeric antigen receptor (CAR).

[0182] Also provided herein are methods of treating a disease in a subject by administering an effective amount of a composition comprising circular RNA encoding a functional protein and a transfer vehicle described herein to the subject. In some embodiments, the circular RNA is encapsulated within the transfer vehicle. In certain embodiments, such methods may enhance (e.g., increase) the expression of a polynucleotide and/or increase the production and secretion of a functional polypeptide product in one or more target cells and tissues (e.g., immune cells or hepatocytes). Generally, such methods comprise contacting the target cells with one or more compounds and/or transfer vehicles that comprise or otherwise encapsulate the circRNA.

[0183] In certain embodiments, the transfer vehicles (e.g., lipid nanoparticles) are formulated based in part upon their ability to facilitate the transfection (e.g., of a circular RNA) of a target cell. In another embodiment, the transfer vehicles (e.g., lipid nanoparticles) may be selected and/or prepared to optimize delivery of circular RNA to a target cell, tissue or organ. For example, if the target cell is a hepatocyte, or if the target organ is the spleen, the properties of the pharmaceutical and/or liposomal compositions (e.g., size, charge and/or pH) may be optimized to effectively deliver such composition (e.g., lipid nanoparticles) to the target cell or organ, reduce immune clearance and/or promote retention in the target cell or organ. Alternatively, if the target tissue is the central nervous system, the selection and preparation of the transfer vehicle must consider penetration of, and retention within. the blood brain barrier and/or the use of alternate means of directly delivering such compositions (e.g., lipid nanoparticles) to such target tissue (e.g., via intracerebrovascular administration). In certain embodiments, the transfer vehicles may be combined with agents that facilitate the transfer of encapsulated materials across the blood brain barrier (e.g., agents which disrupt or improve the permeability of the blood brain barrier and thereby enhance the transfer of circular RNA to the target cells). While the transfer vehicles described herein (e.g., lipid nanoparticles) can facilitate introduction of circRNA into target cells, the addition of polycations (e.g., poly L-lysine and protamine) to, for example, one or more of the lipid nanoparticles that comprise the pharmaceutical compositions as a copolymer can also facilitate, and in some instances markedly enhance, the transfection efficiency of several types of transfer vehicles by 2-28 fold in a number of cell lines both in vitro and in vivo (See, N. J. Caplen, et al., Gene Ther. 1995; 2: 603; S. Li, et al., Gene Ther. 1997; 4, 891.). In some embodiments, a target cell is an immune cell. In some embodiments, a target cell is a T cell.

[0184] In certain embodiments, the transfer vehicles described herein (e.g., lipid nanoparticles) are prepared by combining multiple lipid components (e.g., one or more of the compounds disclosed herein) with one or more polymer components. For example, a lipid nanoparticle may be prepared using HGT4003, DOPE, cholesterol and DMG-PEG2000. A lipid nanoparticle may be comprised of additional lipid combinations in various ratios, including for example, HGT4001, DOPE and DMG-PEG2000. The selection of ionizable lipids, helper lipids, structural lipids, and/or PEG-modified lipids which comprise the lipid nanoparticles, as well as the relative molar ratio of such lipids to each other, is based upon the characteristics of the selected lipid(s), the nature of the intended target cells or tissues and the characteristics of the materials or polynucleotides to be delivered by the lipid nanoparticle. Additional considerations include, for example, the saturation of the alkyl chain, as well as the size, charge, pH, pKa, fusogenicity and toxicity of the selected lipid(s).

[0185] Transfer vehicles described herein can allow the encapsulated polynucleotide to reach the target cell or may preferentially allow the encapsulated polynucleotide to reach the target cells or organs on a discriminatory basis (e.g., the transfer vehicles may concentrate in the liver or spleen of a subject to which such transfer vehicles are administered). Alternatively, the transfer vehicles may limit the delivery of encapsulated polynucleotides to other non-targeted cells or organs where the presence of the encapsulated polynucleotides may be undesirable or of limited utility.

[0186] Loading or encapsulating a polynucleotide, e.g., circRNA, into a transfer vehicle may serve to protect the polynucleotide from an environment (e.g., serum) which may contain enzymes or chemicals that degrade such polynucleotides and/or systems or receptors that cause the rapid excretion of such polynucleotides. Accordingly, in some embodiments, the compositions described herein are capable of enhancing the stability of the encapsulated polynucleotide(s), particularly with respect to the environments into which such polynucleotides will be exposed.

[0187] In certain embodiments, provided herein is a vector for making circular RNA, the vector comprising a 5′ duplex forming region, a 3′ group I intron fragment, optionally a first spacer, an Internal Ribosome Entry Site (IRES), an expression sequence, optionally a second spacer, a 5′ group I intron fragment, and a 3′ duplex forming region. In some embodiments, these elements are positioned in the vector in the above order. In some embodiments, the vector further comprises an internal 5′ duplex forming region between the 3′ group I intron fragment and the IRES and an internal 3′ duplex forming region between the expression sequence and the 5′ group I intron fragment. In some embodiments, the internal duplex forming regions are capable of forming a duplex between each other but not with the external duplex forming regions. In some embodiments, the internal duplex forming regions are part of the first and second spacers. Additional embodiments include circular RNA polynucleotides, including circular RNA polynucleotides made using the vectors provided herein, compositions comprising such circular RNA, cells comprising such circular RNA, methods of using and making such vectors, circular RNA, compositions and cells.

[0188] In some embodiments, provided herein are methods comprising administration of circular RNA polynucleotides provided herein into cells for therapy or production of useful proteins, such as PAH. In some embodiments, the method is advantageous in providing the production of a desired polypeptide inside eukaryotic cells with a longer half-life than linear RNA, due to the resistance of the circular RNA to ribonucleases.

[0189] Circular RNA polynucleotides lack the free ends necessary for exonuclease-mediated degradation, causing them to be resistant to several mechanisms of RNA degradation and granting extended half-lives when compared to an equivalent linear RNA. Circularization may allow for the stabilization of RNA polynucleotides that generally suffer from short half-lives and may improve the overall efficacy of exogenous mRNA in a variety of applications. In an embodiment, the half-life of the circular RNA polynucleotides provided herein in eukaryotic cells (e.g., mammalian cells, such as human cells) is at least 20 hours (e.g., at least 80 hours).

### 1. Definitions

[0190] As used herein, the terms “circRNA” or “circular polyribonucleotide” or “circular RNA” or “oRNA” are used interchangeably and refers to a polyribonucleotide that forms a circular structure through covalent bonds.

[0191] As used herein, the term “3′ group I intron fragment” refers to a sequence with 75% or higher similarity to the 3′-proximal end of a natural group I intron including the splice site dinucleotide and optionally a stretch of natural exon sequence.

[0192] As used herein, the term “5′ group I intron fragment” refers to a sequence with 75% or higher similarity to the 5′-proximal end of a natural group I intron including the splice site dinucleotide and optionally a stretch of natural exon sequence.

[0193] As used herein, the term “permutation site” refers to the site in a group I intron where a cut is made prior to permutation of the intron. This cut generates 3′ and 5′ group I intron fragments that are permuted to be on either side of a stretch of precursor RNA to be circularized.

[0194] As used herein, the term “splice site” refers to a dinucleotide that is partially or fully included in a group I intron and between which a phosphodiester bond is cleaved during RNA circularization.

[0195] As used herein, the term “therapeutic protein” refers to any protein that, when administered to a subject directly or indirectly in the form of a translated nucleic acid, has a therapeutic, diagnostic, and/or prophylactic effect and/or elicits a desired biological and/or pharmacological effect.

[0196] As used herein, the term “immunogenic” refers to a potential to induce an immune response to a substance. An immune response may be induced when an immune system of an organism or a certain type of immune cells is exposed to an immunogenic substance. The term “non-immunogenic” refers to a lack of or absence of an immune response above a detectable threshold to a substance. No immune response is detected when an immune system of an organism or a certain type of immune cells is exposed to a non-immunogenic substance. In some embodiments, a non-immunogenic circular polyribonucleotide as provided herein, does not induce an immune response above a pre-determined threshold when measured by an immunogenicity assay. In some embodiments, no innate immune response is detected when an immune system of an organism or a certain type of immune cells is exposed to a non-immunogenic circular polyribonucleotide as provided herein. In some embodiments, no adaptive immune response is detected when an immune system of an organism or a certain type of immune cell is exposed to a non-immunogenic circular polyribonucleotide as provided herein.

[0197] As used herein, the term “circularization efficiency” refers to a measurement of resultant circular polyribonucleotide as compared to its linear starting material.

[0198] As used herein, the term “translation efficiency” refers to a rate or amount of protein or peptide production from a ribonucleotide transcript. In some embodiments, translation efficiency can be expressed as amount of protein or peptide produced per given amount of transcript that codes for the protein or peptide.

[0199] The term “nucleotide” refers to a ribonucleotide, a deoxyribonucleotide, a modified form thereof, or an analog thereof. Nucleotides include species that comprise purines, e.g., adenine, hypoxanthine, guanine, and their derivatives and analogs, as well as pyrimidines, e.g., cytosine, uracil, thymine, and their derivatives and analogs. Nucleotide analogs include nucleotides having modifications in the chemical structure of the base, sugar and/or phosphate, including, but not limited to, 5′-position pyrimidine modifications, 8′-position purine modifications, modifications at cytosine exocyclic amines, and substitution of 5-bromo-uracil; and 2′-position sugar modifications, including but not limited to, sugar-modified ribonucleotides in which the 2′-OH is replaced by a group such as an H, OR, R, halo, SH, SR, NH₂, NHR, NR₂, or CN, wherein R is an alkyl moiety as defined herein. Nucleotide analogs are also meant to include nucleotides with bases such as inosine, queuosine, xanthine; sugars such as 2′-methyl ribose; non-natural phosphodiester linkages such as methylphosphonate, phosphorothioate and peptide linkages. Nucleotide analogs include 5-methoxyuridine, 1-methylpseudouridine, and 6-methyladenosine.

[0200] The term “nucleic acid” and “polynucleotide” are used interchangeably herein to describe a polymer of any length, e.g., greater than about 2 bases, greater than about 10 bases, greater than about 100 bases, greater than about 500 bases, greater than 1000 bases, or up to about 10,000 or more bases, composed of nucleotides, e.g., deoxyribonucleotides or ribonucleotides, and may be produced enzymatically or synthetically (e.g., as described in U.S. Pat. No. 5,948,902 and the references cited therein), which can hybridize with naturally occurring nucleic acids in a sequence specific manner analogous to that of two naturally occurring nucleic acids, e.g., can participate in Watson-Crick base pairing interactions. Naturally occurring nucleic acids are comprised of nucleotides including guanine, cytosine, adenine, thymine, and uracil (G, C, A, T, and U respectively).

[0201] The terms “ribonucleic acid” and “RNA” as used herein mean a polymer composed of ribonucleotides.

[0202] The terms “deoxyribonucleic acid” and “DNA” as used herein mean a polymer composed of deoxyribonucleotides.

[0203] “Isolated” or “purified” generally refers to isolation of a substance (for example, in some embodiments, a compound, a polynucleotide, a protein, a polypeptide, a polynucleotide composition, or a polypeptide composition) such that the substance comprises a significant percent (e.g., greater than 1%, greater than 2%, greater than 5%, greater than 10%, greater than 20%, greater than 50%, or more, usually up to about 90%-100%) of the sample in which it resides. In certain embodiments, a substantially purified component comprises at least 50%, 80%-85%, or 90%-95% of the sample. Techniques for purifying polynucleotides and polypeptides of interest are well-known in the art and include, for example, ion-exchange chromatography, affinity chromatography and sedimentation according to density. Generally, a substance is purified when it exists in a sample in an amount, relative to other components of the sample, that is more than as it is found naturally.

[0204] The terms “duplexed,” “double-stranded,” or “hybridized” as used herein refer to nucleic acids formed by hybridization of two single strands of nucleic acids containing complementary sequences. In most cases, genomic DNA is double-stranded. Sequences can be fully complementary or partially complementary.

[0205] As used herein, “unstructured” with regard to RNA refers to an RNA sequence that is not predicted by the RNAFold software or similar predictive tools to form a structure (e.g., a hairpin loop) with itself or other sequences in the same RNA molecule. In some embodiments, unstructured RNA can be functionally characterized using nuclease protection assays.

[0206] As used herein, “structured” with regard to RNA refers to an RNA sequence that is predicted by the RNAFold software or similar predictive tools to form a structure (e.g., a hairpin loop) with itself or other sequences in the same RNA molecule.

[0207] As used herein, two “duplex forming regions,” “homology arms,” or “homology regions,” may be any two regions that are thermodynamically favored to cross-pair in a sequence specific interaction. In some embodiments, two duplex forming regions, homology arms, or homology regions, share a sufficient level of sequence identity to one another's reverse complement to act as substrates for a hybridization reaction. As used herein polynucleotide sequences have “homology” when they are either identical or share sequence identity to a reverse complement or “complementary” sequence. The percent sequence identity between a homology region and a counterpart homology region's reverse complement can be any percent of sequence identity that allows for hybridization to occur. In some embodiments, an internal duplex forming region of an inventive polynucleotide is capable of forming a duplex with another internal duplex forming region and does not form a duplex with an external duplex forming region.

[0208] Linear nucleic acid molecules are said to have a “5′-terminus” (5′ end) and a “3′-terminus” (3′ end) because nucleic acid phosphodiester linkages occur at the 5′ carbon and 3′ carbon of the sugar moieties of the substituent mononucleotides. The end nucleotide of a polynucleotide at which a new linkage would be to a 5′ carbon is its 5′ terminal nucleotide. The end nucleotide of a polynucleotide at which a new linkage would be to a 3′ carbon is its 3′ terminal nucleotide. A terminal nucleotide, as used herein, is the nucleotide at the end position of the 3′- or 5′-terminus

[0209] “Transcription” means the formation or synthesis of an RNA molecule by an RNA polymerase using a DNA molecule as a template. The invention is not limited with respect to the RNA polymerase that is used for transcription. For example, in some embodiments, a T7-type RNA polymerase can be used.

[0210] “Translation” means the formation of a polypeptide molecule by a ribosome based upon an RNA template.

[0211] It is to be understood that the terminology used herein is for the purpose of describing particular embodiments only, and is not intended to be limiting. As used in this specification and the appended claims, the singular forms “a,” “an,” and “the” include plural referents unless the content clearly dictates otherwise. Thus, for example, reference to “a cell” includes combinations of two or more cells, or entire cultures of cells; reference to “a polynucleotide” includes, as a practical matter, many copies of that polynucleotide. Unless specifically stated or obvious from context, as used herein, the term “or” is understood to be inclusive. Unless defined herein and below in the reminder of the specification, all technical and scientific terms used herein have the same meaning as commonly understood by one of ordinary skill in the art to which the invention pertains.

[0212] Unless specifically stated or obvious from context, as used herein, the term “about,” is understood as within a range of normal tolerance in the art, for example within 2 standard deviations of the mean. “About” can be understood as within 10%, 9%, 8%, 7%, 6%, 5%, 4%, 3%, 2%, 1%, 0.9%, 0.8%, 0.7%, 0.6%, 0.5%, 0.4%, 0.3%, 0.2%, 0.1%, 0.09%, 0.08%, 0.07%, 0.06%, 0.05%, 0.04%, 0.03%, 0.02%, or 0.01% of the stated value. Unless otherwise clear from the context, all numerical values provided herein are modified by the term “about.”

[0213] As used herein, the term “encode” refers broadly to any process whereby the information in a polymeric macromolecule is used to direct the production of a second molecule that is different from the first. The second molecule may have a chemical structure that is different from the chemical nature of the first molecule.

[0214] By “co-administering” is meant administering a therapeutic agent provided herein in conjunction with one or more additional therapeutic agents sufficiently close in time such that the therapeutic agent provided herein can enhance the effect of the one or more additional therapeutic agents, or vice versa.

[0215] The terms “treat,” and “prevent” as well as words stemming therefrom, as used herein, do not necessarily imply 100% or complete treatment or prevention. Rather, there are varying degrees of treatment or prevention of which one of ordinary skill in the art recognizes as having a potential benefit or therapeutic effect. The treatment or prevention provided by the method disclosed herein can include treatment or prevention of one or more conditions or symptoms of the disease. Also, for purposes herein, “prevention” can encompass delaying the onset of the disease, or a symptom or condition thereof.

[0216] As used herein, the term “expression sequence” refers to a nucleic acid sequence that encodes a product, e.g., a peptide or polypeptide, regulatory nucleic acid, or non-coding nucleic acid. An exemplary expression sequence that codes for a peptide or polypeptide can comprise a plurality of nucleotide triads, each of which can code for an amino acid and is termed as a “codon”.

[0217] As used herein, a “spacer” refers to a region of a polynucleotide sequence ranging from 1 nucleotide to hundreds or thousands of nucleotides separating two other elements along a polynucleotide sequence. The sequences can be defined or can be random. A spacer is typically non-coding. In some embodiments, spacers include duplex forming regions.

[0218] As used herein, “splice site” refers to the dinucleotide or dinucleotides between which cleavage of the phosphodiester bond occurs during a splicing reaction. A “5′ splice site” refers to the natural 5′ dinucleotide of the intron e.g., group I intron, while a “3′ splice site” refers to the natural 3′ dinucleotide of the intron.

[0219] As used herein, an “internal ribosome entry site” or “IRES” refers to an RNA sequence or structural element ranging in size from 10 nt to 1000 nt or more, capable of initiating translation of a polypeptide in the absence of a typical RNA cap structure. An IRES is typically about 500 nt to about 700 nt in length.

[0220] As used herein, a “miRNA site” refers to a stretch of nucleotides within a polynucleotide that is capable of forming a duplex with at least 8 nucleotides of a natural miRNA sequence.

[0221] As used herein, an “endonuclease site” refers to a stretch of nucleotides within a polynucleotide that is capable of being recognized and cleaved by an endonuclease protein.

[0222] As used herein, “bicistronic RNA” refers to a polynucleotide that includes two expression sequences coding for two distinct proteins. These expression sequences can be separated by a nucleotide sequence encoding a cleavable peptide such as a protease cleavage site. They can also be separated by a ribosomal skipping element.

[0223] As used herein, the term“ribosomal skipping element” refers to a nucleotide sequence encoding a short peptide sequence capable of causing generation of two peptide chains from translation of one RNA molecule. While not wishing to be bound by theory, it is hypothesized that ribosomal skipping elements function by (1) terminating translation of the first peptide chain and re-initiating translation of the second peptide chain; or (2) cleavage of a peptide bond in the peptide sequence encoded by the ribosomai skipping element by an intrinsic protease activity of the encoded peptide, or by another protease in the environment (e.g., cytosol).

[0224] As used herein, the term “co-formulate” refers to a nanoparticle formulation comprising two or more nucleic acids or a nucleic acid and other active drug substance. Typically, the ratios are equimolar or defined in the ratiometric amount of the two or more nucleic acids or the nucleic acid and other active drug substance.

[0225] As used herein, “transfer vehicle” includes any of the standard pharmaceutical carriers, diluents, excipients, and the like, which are generally intended for use in connection with the administration of biologically active agents, including nucleic acids.

[0226] As used herein, the phrase “lipid nanoparticle” refers to a transfer vehicle comprising one or more lipids (e.g., in some embodiments, cationic lipids, non-cationic lipids, and PEG-modified lipids).

[0227] As used herein, the phrase “ionizable lipid” refers to any of a number of lipid species that carry a net positive charge at a selected pH, such as physiological pH 4 and a neutral charge at other pHs such as physiological pH 7.

[0228] In some embodiments, a lipid, e.g., an ionizable lipid, disclosed herein comprises one or more cleavable groups. The terms “cleave” and “cleavable” are used herein to mean that one or more chemical bonds (e.g., one or more of covalent bonds, hydrogen-bonds, van der Waals' forces and/or ionic interactions) between atoms in or adjacent to the subject functional group are broken (e.g., hydrolyzed) or are capable of being broken upon exposure to selected conditions (e.g., upon exposure to enzymatic conditions). In certain embodiments, the cleavable group is a disulfide functional group, and in particular embodiments is a disulfide group that is capable of being cleaved upon exposure to selected biological conditions (e.g., intracellular conditions). In certain embodiments, the cleavable group is an ester functional group that is capable of being cleaved upon exposure to selected biological conditions. For example, the disulfide groups may be cleaved enzymatically or by a hydrolysis, oxidation or reduction reaction. Upon cleavage of such disulfide functional group, the one or more functional moieties or groups (e.g., one or more of a head-group and/or a tail-group) that are bound thereto may be liberated. Exemplary cleavable groups may include, but are not limited to, disulfide groups, ester groups, ether groups, and any derivatives thereof (e.g., alkyl and aryl esters). In certain embodiments, the cleavable group is not an ester group or an ether group. In some embodiments, a cleavable group is bound (e.g., bound by one or more of hydrogen-bonds, van der Waals' forces, ionic interactions and covalent bonds) to one or more functional moieties or groups (e.g., at least one head-group and at least one tail-group). In certain embodiments, at least one of the functional moieties or groups is hydrophilic (e.g., a hydrophilic head-group comprising one or more of imidazole, guanidinium, amino, imine, enamine, optionally-substituted alkyl amino and pyridyl).

[0229] As used herein, the term “hydrophilic” is used to indicate in qualitative terms that a functional group is water-preferring, and typically such groups are water-soluble. For example, disclosed herein are compounds that comprise a cleavable disulfide (S—S) functional group bound to one or more hydrophilic groups (e.g., a hydrophilic head-group), wherein such hydrophilic groups comprise or are selected from the group consisting of imidazole, guanidinium, amino, imine, enamine, an optionally-substituted alkyl amino (e.g., an alkyl amino such as dimethylamino) and pyridyl.

[0230] In certain embodiments, at least one of the functional groups of moieties that comprise the compounds disclosed herein is hydrophobic in nature (e.g., a hydrophobic tail-group comprising a naturally occurring lipid such as cholesterol). As used herein, the term “hydrophobic” is used to indicate in qualitative terms that a functional group is water-avoiding, and typically such groups are not water soluble. For example, disclosed herein are compounds that comprise a cleavable functional group (e.g., a disulfide (S—S) group) bound to one or more hydrophobic groups, wherein such hydrophobic groups comprise one or more naturally occurring lipids such as cholesterol, and/or an optionally substituted, variably saturated or unsaturated C6-C₂₀ alkyl and/or an optionally substituted, variably saturated or unsaturated C6-C20 acyl.

[0231] Compound described herein may also comprise one or more isotopic substitutions. For example, H may be in any isotopic form, including ¹H, ²H (D or deuterium), and ³H (T or tritium); C may be in any isotopic form, including ¹²C, ¹³C, and ¹⁴C; O may be in any isotopic form, including ¹⁶O and ¹⁸O; F may be in any isotopic form, including ¹⁸F and ¹⁹F; and the like.

[0232] When describing the invention, which may include compounds and pharmaceutically acceptable salts thereof, pharmaceutical compositions containing such compounds and methods of using such compounds and compositions, the following terms, if present, have the following meanings unless otherwise indicated. It should also be understood that when described herein any of the moieties defined forth below may be substituted with a variety of substituents, and that the respective definitions are intended to include such substituted moieties within their scope as set out below. Unless otherwise stated, the term “substituted” is to be defined as set out below. It should be further understood that the terms “groups” and “radicals” can be considered interchangeable when used herein.

[0233] When a range of values is listed, it is intended to encompass each value and sub-range within the range. For example, “C₁₋₆ alkyl” is intended to encompass, C₁, C₂, C₃, C₄, C₅, C₆, C₁₋₆, C₁₋₅, C₁₋₄, C₁₋₃, C₁₋₂, C₂₋₆, C₂₋₅, C₂₋₄, C₂₋₃, C₃₋₆, C₃₋₅, C₃₋₄, C₄₋₆, C₄₋₅, and C₅₋₆ alkyl.

[0234] In certain embodiments, the compounds disclosed herein comprise, for example, at least one hydrophilic head-group and at least one hydrophobic tail-group, each bound to at least one cleavable group, thereby rendering such compounds amphiphilic. As used herein to describe a compound or composition, the term “amphiphilic” means the ability to dissolve in both polar (e.g., water) and non-polar (e.g., lipid) environments. For example, in certain embodiments, the compounds disclosed herein comprise at least one lipophilic tail-group (e.g., cholesterol or a C₆-C₂₀ alkyl) and at least one hydrophilic head-group (e.g., imidazole), each bound to a cleavable group (e.g., disulfide).

[0235] It should be noted that the terms “head-group” and “tail-group” as used describe the compounds of the present invention, and in particular functional groups that comprise such compounds, are used for ease of reference to describe the orientation of one or more functional groups relative to other functional groups. For example, in certain embodiments a hydrophilic head-group (e.g., guanidinium) is bound (e.g., by one or more of hydrogen-bonds, van der Waals' forces, ionic interactions and covalent bonds) to a cleavable functional group (e.g., a disulfide group), which in turn is bound to a hydrophobic tail-group (e.g., cholesterol).

[0236] As used herein, the term “alkyl” refers to both straight and branched chain C₁-C₄₀ hydrocarbons (e.g., C₆-C₂₀ hydrocarbons), and include both saturated and unsaturated hydrocarbons. In certain embodiments, the alkyl may comprise one or more cyclic alkyls and/or one or more heteroatoms such as oxygen, nitrogen, or sulfur and may optionally be substituted with substituents (e.g., one or more of alkyl, halo, alkoxyl, hydroxy, amino, aryl, ether, ester or amide). In certain embodiments, a contemplated alkyl includes (9Z,12Z)-octadeca-9,12-dien. The use of designations such as, for example, “C₆-C₂₀” is intended to refer to an alkyl (e.g., straight or branched chain and inclusive of alkenes and alkyls) having the recited range carbon atoms. In some embodiments, an alkyl group has 1 to 10 carbon atoms (“C₁₋₁₀ alkyl”). In some embodiments, an alkyl group has 1 to 9 carbon atoms (“C₁₋₉ alkyl”). In some embodiments, an alkyl group has 1 to 8 carbon atoms (“C₁₋₈ alkyl”). In some embodiments, an alkyl group has 1 to 7 carbon atoms (“C₁₋₇ alkyl”). In some embodiments, an alkyl group has 1 to 6 carbon atoms (“C₁₋₆ alkyl”). In some embodiments, an alkyl group has 1 to 5 carbon atoms (“C₁₋₅ alkyl”). In some embodiments, an alkyl group has 1 to 4 carbon atoms (“C₁₋₄ alkyl”). In some embodiments, an alkyl group has 1 to 3 carbon atoms (“C₁₋₃ alkyl”). In some embodiments, an alkyl group has 1 to 2 carbon atoms (“C₁₋₂ alkyl”). In some embodiments, an alkyl group has 1 carbon atom (“C₁ alkyl”). Examples of C₁₋₆ alkyl groups include methyl, ethyl, propyl, isopropyl, butyl, isobutyl, pentyl, hexyl, and the like.

[0237] As used herein, “alkenyl” refers to a radical of a straight-chain or branched hydrocarbon group having from 2 to 20 carbon atoms, one or more carbon-carbon double bonds (e.g., 1, 2, 3, or 4 carbon-carbon double bonds), and optionally one or more carbon-carbon triple bonds (e.g., 1, 2, 3, or 4 carbon-carbon triple bonds) (“C₂₋₂₀ alkenyl”). In certain embodiments, alkenyl does not contain any triple bonds. In some embodiments, an alkenyl group has 2 to 10 carbon atoms (“C₂₋₁₀ alkenyl”). In some embodiments, an alkenyl group has 2 to 9 carbon atoms (“C₂₋₉ alkenyl”). In some embodiments, an alkenyl group has 2 to 8 carbon atoms (“C₂₋₈ alkenyl”). In some embodiments, an alkenyl group has 2 to 7 carbon atoms (“C₂₋₇ alkenyl”). In some embodiments, an alkenyl group has 2 to 6 carbon atoms (“C₂₋₆ alkenyl”). In some embodiments, an alkenyl group has 2 to 5 carbon atoms (“C₂₋₅ alkenyl”). In some embodiments, an alkenyl group has 2 to 4 carbon atoms (“C₂₋₄ alkenyl”). In some embodiments, an alkenyl group has 2 to 3 carbon atoms (“C₂₋₃ alkenyl”). In some embodiments, an alkenyl group has 2 carbon atoms (“C₂ alkenyl”). The one or more carbon-carbon double bonds can be internal (such as in 2-butenyl) or terminal (such as in 1-butenyl). Examples of C2-4 alkenyl groups include ethenyl (C₂), 1-propenyl (C₃), 2-propenyl (C₃), 1-butenyl (C₄), 2-butenyl (C4), butadienyl (C4), and the like. Examples of C2-6 alkenyl groups include the aforementioned C2-4 alkenyl groups as well as pentenyl (C₅), pentadienyl (C₅), hexenyl (C6), and the like. Additional examples of alkenyl include heptenyl (C₇), octenyl (C₈), octatrienyl (C₈), and the like.

[0238] As used herein, “alkynyl” refers to a radical of a straight-chain or branched hydrocarbon group having from 2 to 20 carbon atoms, one or more carbon-carbon triple bonds (e.g., 1, 2, 3, or 4 carbon-carbon triple bonds), and optionally one or more carbon-carbon double bonds (e.g., 1, 2, 3, or 4 carbon-carbon double bonds) (“C220 alkynyl”). In certain embodiments, alkynyl does not contain any double bonds. In some embodiments, an alkynyl group has 2 to 10 carbon atoms (“C₂₋₁₀ alkynyl”). In some embodiments, an alkynyl group has 2 to 9 carbon atoms (“C₂₋₉ alkynyl”). In some embodiments, an alkynyl group has 2 to 8 carbon atoms (“C₂₋₈ alkynyl”). In some embodiments, an alkynyl group has 2 to 7 carbon atoms (“C₂₋₇ alkynyl”). In some embodiments, an alkynyl group has 2 to 6 carbon atoms (“C₂₋₆ alkynyl”). In some embodiments, an alkynyl group has 2 to 5 carbon atoms (“C₂₋₅ alkynyl”). In some embodiments, an alkynyl group has 2 to 4 carbon atoms (“C₂₋₄ alkynyl”). In some embodiments, an alkynyl group has 2 to 3 carbon atoms (“C₂₋₃ alkynyl”). In some embodiments, an alkynyl group has 2 carbon atoms (“C₂ alkynyl”). The one or more carbon-carbon triple bonds can be internal (such as in 2-butynyl) or terminal (such as in 1-butynyl). Examples of C₂₋₄ alkynyl groups include, without limitation, ethynyl (C₂), 1-propynyl (C₃), 2-propynyl (C₃), 1-butynyl (C₄), 2-butynyl (C₄), and the like. Examples of C₂₋₆ alkenyl groups include the aforementioned C₂₋₄ alkynyl groups as well as pentynyl (C₅), hexynyl (C6), and the like. Additional examples of alkynyl include heptynyl (C₇), octynyl (C₈), and the like.

[0239] As used herein, “alkylene,” “alkenylene,” and “alkynylene,” refer to a divalent radical of an alkyl, alkenyl, and alkynyl group respectively. When a range or number of carbons is provided for a particular “alkylene,” “alkenylene,” or “alkynylene,” group, it is understood that the range or number refers to the range or number of carbons in the linear carbon divalent chain. “Alkylene,” “alkenylene,” and “alkynylene,” groups may be substituted or unsubstituted with one or more substituents as described herein.

[0240] As used herein, the term “aryl” refers to aromatic groups (e.g., monocyclic, bicyclic and tricyclic structures) containing six to ten carbons in the ring portion. The aryl groups may be optionally substituted through available carbon atoms and in certain embodiments may include one or more heteroatoms such as oxygen, nitrogen or sulfur. In some embodiments, an aryl group has six ring carbon atoms (“C₆ aryl”; e.g., phenyl). In some embodiments, an aryl group has ten ring carbon atoms (“C₁₀ aryl”; e.g., naphthyl such as 1-naphthyl and 2-naphthyl).

[0241] As used herein, “heteroaryl” refers to a radical of a 5-10 membered monocyclic or bicyclic 4n+2 aromatic ring system (e.g., having 6 or 10 electrons shared in a cyclic array) having ring carbon atoms and 1-4 ring heteroatoms provided in the aromatic ring system, wherein each heteroatom is independently selected from nitrogen, oxygen and sulfur (“5-10 membered heteroaryl”). In heteroaryl groups that contain one or more nitrogen atoms, the point of attachment can be a carbon or nitrogen atom, as valency permits. Heteroaryl bicyclic ring systems can include one or more heteroatoms in one or both rings. “Heteroaryl” includes ring systems wherein the heteroaryl ring, as defined above, is fused with one or more carbocyclyl or heterocyclyl groups wherein the point of attachment is on the heteroaryl ring, and in such instances, the number of ring members continue to designate the number of ring members in the heteroaryl ring system. “Heteroaryl” also includes ring systems wherein the heteroaryl ring, as defined above, is fused with one or more aryl groups wherein the point of attachment is either on the aryl or heteroaryl ring, and in such instances, the number of ring members designates the number of ring members in the fused (aryl/heteroaryl) ring system. Bicyclic heteroaryl groups wherein one ring does not contain a heteroatom (e.g., indolyl, quinolinyl, carbazolyl, and the like) the point of attachment can be on either ring, i.e., either the ring bearing a heteroatom (e.g., 2-indolyl) or the ring that does not contain a heteroatom (e.g., 5-indolyl).

[0242] The term “cycloalkyl” refers to a monovalent saturated cyclic, bicyclic, or bridged cyclic (e.g., adamantyl) hydrocarbon group of 3-12, 3-8, 4-8, or 4-6 carbons, referred to herein, e.g., as “C₄₋₈cycloalkyl,” derived from a cycloalkane. Exemplary cycloalkyl groups include, but are not limited to, cyclohexanes, cyclopentanes, cyclobutanes and cyclopropanes.

[0243] As used herein, “heterocyclyl” or “heterocyclic” refers to a radical of a 3-to 10-membered non-aromatic ring system having ring carbon atoms and 1 to 4 ring heteroatoms, wherein each heteroatom is independently selected from nitrogen, oxygen, sulfur, boron, phosphorus, and silicon (“3-10 membered heterocyclyl”). In heterocyclyl groups that contain one or more nitrogen atoms, the point of attachment can be a carbon or nitrogen atom, as valency permits. A heterocyclyl group can either be monocyclic (“monocyclic heterocyclyl”) or a fused, bridged or spiro ring system such as a bicyclic system (“bicyclic heterocyclyl”), and can be saturated or can be partially unsaturated. Heterocyclyl bicyclic ring systems can include one or more heteroatoms in one or both rings. “Heterocyclyl” also includes ring systems wherein the heterocyclyl ring, as defined above, is fused with one or more carbocyclyl groups wherein the point of attachment is either on the carbocyclyl or heterocyclyl ring, or ring systems wherein the heterocyclyl ring, as defined above, is fused with one or more aryl or heteroaryl groups, wherein the point of attachment is on the heterocyclyl ring, and in such instances, the number of ring members continue to designate the number of ring members in the heterocyclyl ring system. The terms “heterocycle,” “heterocyclyl,” “heterocyclyl ring,” “heterocyclic group,” “heterocyclic moiety,” and “heterocyclic radical,” may be used interchangeably.

[0244] As used herein, “cyano” refers to —CN.

[0245] The terms “halo” and “halogen” as used herein refer to an atom selected from fluorine (fluoro, —F), chlorine (chloro, —Cl), bromine (bromo, —Br), and iodine (iodo, —I). In certain embodiments, the halo group is either fluoro or chloro.

[0246] The term “alkoxy,” as used herein, refers to an alkyl group which is attached to another moiety via an oxygen atom (—O(alkyl)). Non-limiting examples include e.g., methoxy, ethoxy, propoxy, and butoxy.

[0247] As used herein, “oxo” refers to —C═O.

[0248] In general, the term “substituted”, whether preceded by the term “optionally” or not, means that at least one hydrogen present on a group (e.g., a carbon or nitrogen atom) is replaced with a permissible substituent, e.g., a substituent which upon substitution results in a stable compound, e.g., a compound which does not spontaneously undergo transformation such as by rearrangement, cyclization, elimination, or other reaction. Unless otherwise indicated, a “substituted” group has a substituent at one or more substitutable positions of the group, and when more than one position in any given structure is substituted, the substituent is either the same or different at each position.

[0249] As used herein, “pharmaceutically acceptable salt” refers to those salts which are, within the scope of sound medical judgment, suitable for use in contact with the tissues of humans and lower animals without undue toxicity, irritation, allergic response and the like, and are commensurate with a reasonable benefit/risk ratio. Pharmaceutically acceptable salts are well known in the art. For example, Berge et al., describes pharmaceutically acceptable salts in detail in J. Pharmaceutical Sciences (1977) 66:1-19. Pharmaceutically acceptable salts of the compounds of this invention include those derived from suitable inorganic and organic acids and bases. Examples of pharmaceutically acceptable, nontoxic acid addition salts are salts of an amino group formed with inorganic acids such as hydrochloric acid, hydrobromic acid, phosphoric acid, sulfuric acid and perchloric acid or with organic acids such as acetic acid, oxalic acid, maleic acid, tartaric acid, citric acid, succinic acid or malonic acid or by using other methods used in the art such as ion exchange. Other pharmaceutically acceptable salts include adipate, alginate, ascorbate, aspartate, benzenesulfonate, benzoate, bisulfate, borate, butyrate, camphorate, camphorsulfonate, citrate, cyclopentanepropionate, digluconate, dodecylsulfate, ethanesulfonate, formate, fumarate, glucoheptonate, glycerophosphate, gluconate, hemisulfate, heptanoate, hexanoate, hydroiodide, 2-hydroxy-ethanesulfonate, lactobionate, lactate, laurate, lauryl sulfate, malate, maleate, malonate, methanesulfonate, 2-naphthalenesulfonate, nicotinate, nitrate, oleate, oxalate, palmitate, pamoate, pectinate, persulfate, 3-phenylpropionate, phosphate, picrate, pivalate, propionate, stearate, succinate, sulfate, tartrate, thiocyanate, p-toluenesulfonate, undecanoate, valerate salts, and the like. Pharmaceutically acceptable salts derived from appropriate bases include alkali metal, alkaline earth metal, ammonium and N⁺ (C₁₋₄alkyl)₄ salts. Representative alkali or alkaline earth metal salts include sodium, lithium, potassium, calcium, magnesium, and the like. Further pharmaceutically acceptable salts include, when appropriate, nontoxic ammonium, quaternary ammonium, and amine cations formed using counterions such as halide, hydroxide, carboxylate, sulfate, phosphate, nitrate, lower alkyl sulfonate, and aryl sulfonate.

[0250] In typical embodiments, the present invention is intended to encompass the compounds disclosed herein, and the pharmaceutically acceptable salts, pharmaceutically acceptable esters, tautomeric forms, polymorphs, and prodrugs of such compounds. In some embodiments, the present invention includes a pharmaceutically acceptable addition salt, a pharmaceutically acceptable ester, a solvate (e.g., hydrate) of an addition salt, a tautomeric form, a polymorph, an enantiomer, a mixture of enantiomers, a stereoisomer or mixture of stereoisomers (pure or as a racemic or non-racemic mixture) of a compound described herein.

[0251] Compounds described herein can comprise one or more asymmetric centers, and thus can exist in various isomeric forms, e.g., enantiomers and/or diastereomers. For example, the compounds described herein can be in the form of an individual enantiomer, diastereomer or geometric isomer, or can be in the form of a mixture of stereoisomers, including racemic mixtures and mixtures enriched in one or more stereoisomer. Isomers can be isolated from mixtures by methods known to those skilled in the art, including chiral high pressure liquid chromatography (HPLC) and the formation and crystallization of chiral salts; or preferred isomers can be prepared by asymmetric syntheses. See, for example, Jacques et al., Enantiomers, Racemates and Resolutions (Wiley Interscience, New York, 1981); Wilen et al., Tetrahedron 33:2725 (1977); Eliel, Stereochemistry of Carbon Compounds (McGraw-Hill, N Y, 1962); and Wilen, Tables of Resolving Agents and Optical Resolutions p. 268 (E. L. Eliel, Ed., Univ. of Notre Dame Press, Notre Dame, Ind. 1972). The invention additionally encompasses compounds described herein as individual isomers substantially free of other isomers, and alternatively, as mixtures of various isomers.

[0252] In certain embodiments the compounds and the transfer vehicles of which such compounds are a component (e.g., lipid nanoparticles) exhibit an enhanced (e.g., increased) ability to transfect one or more target cells. Accordingly, also provided herein are methods of transfecting one or more target cells. Such methods generally comprise the step of contacting the one or more target cells with the compounds and/or pharmaceutical compositions disclosed herein such that the one or more target cells are transfected with the circular RNA encapsulated therein. As used herein, the terms “transfect” or “transfection” refer to the intracellular introduction of one or more encapsulated materials (e.g., nucleic acids and/or polynucleotides) into a cell, or preferably into a target cell. The term “transfection efficiency” refers to the relative amount of such encapsulated material (e.g., polynucleotides) up-taken by, introduced into and/or expressed by the target cell which is subject to transfection. In some embodiments, transfection efficiency may be estimated by the amount of a reporter polynucleotide product produced by the target cells following transfection. In some embodiments, a transfer vehicle has high transfection efficiency. In some embodiments, a transfer vehicle has at least about 10%, 20%, 30%, 40%, 50%, 60%, 70%, 80%, or 90% transfection efficiency.

[0253] As used herein, the term “liposome” generally refers to a vesicle composed of lipids (e.g., amphiphilic lipids) arranged in one or more spherical bilayer or bilayers. In certain embodiments, the liposome is a lipid nanoparticle (e.g., a lipid nanoparticle comprising one or more of the ionizable lipid compounds disclosed herein). Such liposomes may be unilamellar or multilamellar vesicles which have a membrane formed from a lipophilic material and an aqueous interior that contains the encapsulated circRNA to be delivered to one or more target cells, tissues and organs. In certain embodiments, the compositions described herein comprise one or more lipid nanoparticles. Examples of suitable lipids (e.g., ionizable lipids) that may be used to form the liposomes and lipid nanoparticles contemplated include one or more of the compounds disclosed herein (e.g., HGT4001, HGT4002, HGT4003, HGT4004 and/or HGT4005). Such liposomes and lipid nanoparticles may also comprise additional ionizable lipids such as C12-200, DLin-KC2-DMA, and/or HGT5001, helper lipids, structural lipids, PEG-modified lipids, MC3, DLinDMA, DLinkC2DMA, cKK-E12, ICE, HGT5000, DODAC, DDAB, DMRIE, DOSPA, DOGS, DODAP, DODMA, DMDMA, DODAC, DLenDMA, DMRIE, CLinDMA, CpLinDMA, DMOBA, DOcarbDAP, DLinDAP, DLincarbDAP, DLinCDAP, KLin-K-DMA, DLin-K-XTC2-DMA, HGT4003, and combinations thereof.

[0254] As used herein, the phrases “non-cationic lipid”, “non-cationic helper lipid”, and “helper lipid” are used interchangeably and refer to any neutral, zwitterionic or anionic lipid.

[0255] As used herein, the phrase “anionic lipid” refers to any of a number of lipid species that carry a net negative charge at a selected pH, such as physiological pH.

[0256] As used herein, the phrase “biodegradable lipid” or “degradable lipid” refers to any of a number of lipid species that are broken down in a host environment on the order of minutes, hours, or days ideally making them less toxic and unlikely to accumulate in a host over time. Common modifications to lipids include ester bonds, and disulfide bonds among others to increase the biodegradability of a lipid.

[0257] As used herein, the phrase “biodegradable PEG lipid” or “degradable PEG lipid” refers to any of a number of lipid species where the PEG molecules are cleaved from the lipid in a host environment on the order of minutes, hours, or days ideally making them less immunogenic. Common modifications to PEG lipids include ester bonds, and disulfide bonds among others to increase the biodegradability of a lipid.

[0258] In certain embodiments of the present invention, the transfer vehicles (e.g., lipid nanoparticles) are prepared to encapsulate one or more materials or therapeutic agents (e.g., circRNA). The process of incorporating a desired therapeutic agent (e.g., circRNA) into a transfer vehicle is referred to herein as or “loading” or “encapsulating” (Lasic, et al., FEBS Lett., 312: 255-258, 1992). The transfer vehicle-loaded or -encapsulated materials (e.g., circRNA) may be completely or partially located in the interior space of the transfer vehicle, within a bilayer membrane of the transfer vehicle, or associated with the exterior surface of the transfer vehicle.

[0259] As used herein, the term “structural lipid” refers to sterols and also to lipids containing sterol moieties.

[0260] As defined herein, “sterols” are a subgroup of steroids consisting of steroid alcohols.

[0261] As used herein, the term “structural lipid” refers to sterols and also to lipids containing sterol moieties.

[0262] As used herein, the term “PEG” means any polyethylene glycol or other polyalkylene ether polymer.

[0263] As generally defined herein, a “PEG-OH lipid” (also referred to herein as “hydroxy-PEGylated lipid”) is a PEGylated lipid having one or more hydroxyl (—OH) groups on the lipid.

[0264] As used herein, a “phospholipid” is a lipid that includes a phosphate moiety and one or more carbon chains, such as unsaturated fatty acid chains.

[0265] All nucleotide sequences disclosed herein can represent an RNA sequence or a corresponding DNA sequence. It is understood that deoxythymidine (dT or T) in a DNA is transcribed into a uridine (U) in an RNA. As such, “T” and “U” are used interchangeably herein in nucleotide sequences.

[0266] The recitations “sequence identity” or, for example, comprising a “sequence 50% identical to,” as used herein, refer to the extent that sequences are identical on a nucleotide-by-nucleotide basis or an amino acid-by-amino acid basis over a window of comparison. Thus, a “percentage of sequence identity” may be calculated by comparing two optimally aligned sequences over the window of comparison, determining the number of positions at which the identical nucleic acid base (e.g., A, T, C, G, I) or the identical amino acid residue (e.g., Ala, Pro, Ser, Thr, Gly, Val, Leu, Ile, Phe, Tyr, Trp, Lys, Arg, His, Asp, Glu, Asn, Gln, Cys and Met) occurs in both sequences to yield the number of matched positions, dividing the number of matched positions by the total number of positions in the window of comparison (i.e., the window size), and multiplying the result by 100 to yield the percentage of sequence identity. Included are nucleotides and polypeptides having at least about 50%, 55%, 60%, 65%, 70%, 75%, 80%, 85%, 90%, 95%, 96%, 97%, 98%, 99% or 100% sequence identity to any of the reference sequences described herein, typically where the polypeptide variant maintains at least one biological activity of the reference polypeptide.

### 2. Vectors, Precursor RNA, and Circular RNA

[0267] Also provided herein are circular RNAs, precursor RNAs that can circularize into the circular RNAs, and vectors (e.g., DNA vectors) that can be transcribed into the precursor RNAs or the circular RNAs.

[0268] Two types of spacers have been designed for improving precursor RNA circularization and/or gene expression from circular RNA. The first type of spacer is external spacer, i.e., present in a precursor RNA but removed upon circularization. While not wishing to be bound by theory, it is contemplated that an external spacer may improve ribozyme-mediated circularization by maintaining the structure of the ribozyme itself and preventing other neighboring sequence elements from interfering with its folding and function. The second type of spacer is internal spacer, i.e., present in a precursor RNA and retained in a resulting circular RNA. While not wishing to be bound by theory, it is contemplated that an internal spacer may improve ribozyme-mediated circularization by maintaining the structure of the ribozyme itself and preventing other neighboring sequence elements, particularly the neighboring IRES and coding region, from interfering with its folding and function. It is also contemplated that an internal spacer may improve protein expression from the IRES by preventing neighboring sequence elements, particularly the intron elements, from hybridizing with sequences within the IRES and inhibiting its ability to fold into its most preferred and active conformation.

[0269] For driving protein expression, the circular RNA comprises an IRES operably linked to a protein coding sequence. Exemplary IRES sequences are provided in Table 17 below. In some embodiments, the circular RNA disclosed herein comprises an IRES sequence at least 80%, 85%, 90%, 91%, 92%, 93%, 94%, 95%, 96%, 97%, 98%, or 99% identical to an IRES sequence in Table 17. In some embodiments, the circular RNA disclosed herein comprises an IRES sequence in Table 17. Modifications of IRES and accessory sequences are disclosed herein to increase or reduce IRES activities, for example, by truncating the 5′ and/or 3′ ends of the IRES, adding a spacer 5′ to the IRES, modifying the 6 nucleotides 5′ to the translation initiation site (Kozak sequence), modification of alternative translation initiation sites, and creating chimeric/hybrid IRES sequences. In some embodiments, the IRES sequence in the circular RNA disclosed herein comprises one or more of these modifications relative to a native IRES (e.g., a native IRES disclosed in Table 17).

[0270] In certain aspects, provided herein are circular RNA polynucleotides comprising a 3′ post splicing group I intron fragment, optionally a first spacer, an Internal Ribosome Entry Site (IRES), an expression sequence, optionally a second spacer, and a 5′ post splicing group I intron fragment. In some embodiments, these regions are in that order. In some embodiments, the circular RNA is made by a method provided herein or from a vector provided herein.

[0271] In certain embodiments, transcription of a vector provided herein (e.g., comprising a 5′ homology region, a 3′ group I intron fragment, optionally a first spacer, an Internal Ribosome Entry Site (IRES), an expression sequence, optionally a second spacer, a 5′ group I intron fragment, and a 3′ homology region) results in the formation of a precursor linear RNA polynucleotide capable of circularizing. In some embodiments, this precursor linear RNA polynucleotide circularizes when incubated in the presence of guanosine nucleotide or nucleoside (e.g., GTP) and divalent cation (e.g., Mg²⁺).

[0272] In some embodiments, the vectors and precursor RNA polynucleotides provided herein comprise a first (5′) duplex forming region and a second (3′) duplex forming region. In certain embodiments, the first and second homology regions may form perfect or imperfect duplexes. Thus, in certain embodiments at least 75%, 80%, 85%, 90%, 91%, 92%, 93%, 94%, 95%, 96%, 97%, 98%, 99% or 100% of the first and second duplex forming regions may be base paired with one another. In some embodiments, the duplex forming regions are predicted to have less than 50% (e.g., less than 45%, less than 40%, less than 35%, less than 30%, less than 25%) base pairing with unintended sequences in the RNA (e.g., non-duplex forming region sequences). In some embodiments, including such duplex forming regions on the ends of the precursor RNA strand, and adjacent or very close to the group I intron fragment, bring the group I intron fragments in close proximity to each other, increasing splicing efficiency. In some embodiments, the duplex forming regions are 3 to 100 nucleotides in length (e.g., 3-75 nucleotides in length, 3-50 nucleotides in length, 20-50 nucleotides in length, 35-50 nucleotides in length, 5-25 nucleotides in length, 9-19 nucleotides in length). In some embodiments, the duplex forming regions are about 3, 4, 5, 6, 7, 8, 9, 10, 11, 12, 13, 14, 15, 16, 17, 18, 19, 20, 21, 22, 23, 24, 25, 26, 27, 28, 29, 30, 31, 32, 33, 34, 35, 36, 37, 38, 39, 40, 41, 42, 43, 44, 45, 46, 47, 48, 49 or 50 nucleotides in length. In some embodiments, the duplex forming regions have a length of about 9 to about 50 nucleotides. In one embodiment, the duplex forming regions have a length of about 9 to about 19 nucleotides. In some embodiments, the duplex forming regions have a length of about 20 to about 40 nucleotides. In certain embodiments, the duplex forming regions have a length of about 30 nucleotides.

[0273] In certain embodiments, the vectors, precursor RNA and circular RNA provided herein comprise a first (5′) and/or a second (3′) spacer. In some embodiments, including a spacer between the 3′ group I intron fragment and the IRES may conserve secondary structures in those regions by preventing them from interacting, thus increasing splicing efficiency. In some embodiments, the first (between 3′ group I intron fragment and IRES) and second (between the expression sequence and 5′ group I intron fragment) spacers comprise additional base pairing regions that are predicted to base pair with each other and not to the first and second duplex forming regions. In some embodiments, such spacer base pairing brings the group I intron fragments in close proximity to each other, further increasing splicing efficiency. Additionally, in some embodiments, the combination of base pairing between the first and second duplex forming regions, and separately, base pairing between the first and second spacers, promotes the formation of a splicing bubble containing the group I intron fragments flanked by adjacent regions of base pairing. Typical spacers are contiguous sequences with one or more of the following qualities: 1) predicted to avoid interfering with proximal structures, for example, the IRES, expression sequence, or intron; 2) is at least 7 nt long and no longer than 100 nt; 3) is located after and adjacent to the 3′ intron fragment and/or before and adjacent to the 5′ intron fragment; and 4) contains one or more of the following: a) an unstructured region at least 5 nt long, b) a region of base pairing at least 5 nt long to a distal sequence, including another spacer, and c) a structured region at least 7 nt long limited in scope to the sequence of the spacer. Spacers may have several regions, including an unstructured region, a base pairing region, a hairpin/structured region, and combinations thereof. In an embodiment, the spacer has a structured region with high GC content. In an embodiment, a region within a spacer base pairs with another region within the same spacer. In an embodiment, a region within a spacer base pairs with a region within another spacer. In an embodiment, a spacer comprises one or more hairpin structures. In an embodiment, a spacer comprises one or more hairpin structures with a stem of 4 to 12 nucleotides and a loop of 2 to 10 nucleotides. In an embodiment, there is an additional spacer between the 3′ group I intron fragment and the IRES. In an embodiment, this additional spacer prevents the structured regions of the IRES from interfering with the folding of the 3′ group I intron fragment or reduces the extent to which this occurs. In some embodiments, the 5′ spacer sequence is at least 7, 8, 9, 10, 11, 12, 13, 14, 15, 16, 17, 18, 19, 20, 25 or 30 nucleotides in length. In some embodiments, the 5′ spacer sequence is no more than 100, 90, 80, 70, 60, 50, 45, 40, 35 or 30 nucleotides in length. In some embodiments the 5′ spacer sequence is between 5 and 50, 10 and 50, 20 and 50, 20 and 40, and/or 25 and 35 nucleotides in length. In certain embodiments, the 5′ spacer sequence is 10, 11, 12, 13, 14, 15, 16, 17, 18, 19, 20, 21, 22, 23, 24, 25, 26, 27, 28, 29, 30, 31, 32, 33, 34, 35, 36, 37, 38, 39, 40, 41, 42, 43, 44, 45, 46, 47, 48, 49 or 50 nucleotides in length. In one embodiment, the 5′ spacer sequence is a polyA sequence. In another embodiment, the 5′ spacer sequence is a polyAC sequence. In one embodiment, a spacer comprises about 10%, 20%, 30%, 40%, 50%, 60%, 70%, 80%, 90%, or 100% polyAC content. In one embodiment, a spacer comprises about 10%, 20%, 30%, 40%, 50%, 60%, 70%, 80%, 90%, or 100% polypyrimidine (C/T or C/U) content.

[0274] In certain embodiments, a 3′ group I intron fragment is a contiguous sequence at least 75% identical (e.g., at least 80%, 85%, 90%, 91%, 92%, 93%, 94%, 95%, 96%, 97%, 98%, 99% or 100% identical) to a 3′ proximal fragment of a natural group I intron including the 3′ splice site dinucleotide and optionally the adjacent exon sequence at least 1 nt in length (e.g., at least 2, 3, 4, 5, 6, 7, 8, 9, 10, 15, 20, 25 or 30 nt in length) and at most the length of the exon. Typically, a 5′ group I intron fragment is a contiguous sequence at least 75% identical (e.g., at least 80%, 85%, 90%, 91%, 92%, 93%, 94%, 95%, 96%, 97%, 98%, 99% or 100% identical) to a 5′ proximal fragment of a natural group I intron including the 5′ splice site dinucleotide and optionally the adjacent exon sequence at least 1 nt in length (e.g., at least 2, 3, 4, 5, 6, 7, 8, 9, 10, 15, 20, 25 or 30 nt in length) and at most the length of the exon. As described by Umekage et al. (2012), external portions of the 3′ group I intron fragment and 5′ group I intron fragment are removed in circularization, causing the circular RNA provided herein to comprise only the portion of the 3′ group I intron fragment formed by the optional exon sequence of at least 1 nt in length and 5′ group I intron fragment formed by the optional exon sequence of at least 1 nt in length, if such sequences were present on the non-circularized precursor RNA. The part of the 3′ group I intron fragment that is retained by a circular RNA is referred to herein as the post splicing 3′ group I intron fragment. The part of the 5′ group I intron fragment that is retained by a circular RNA is referred to herein as the post splicing 5′ group I intron fragment.

[0275] In certain embodiments, the vectors, precursor RNA and circular RNA provided herein comprise an internal ribosome entry site (IRES). Inclusion of an IRES permits the translation of one or more open reading frames from a circular RNA (e.g., open reading frames that form the expression sequence). The IRES element attracts a eukaryotic ribosomal translation initiation complex and promotes translation initiation. See, e.g., Kaufman et al., Nuc. Acids Res. (1991) 19:4485-4490; Gurtu et al., Biochem. Biophys. Res. Comm. (1996) 229:295-298; Rees et al., BioTechniques (1996) 20: 102-110; Kobayashi et al., BioTechniques (1996) 21:399-402; and Mosser et al., BioTechniques 1997 22 150-161).

[0276] A multitude of IRES sequences are available and include sequences derived from a wide variety of viruses, such as from leader sequences of picornaviruses such as the encephalomyocarditis virus (EMCV) UTR (fang et al. J. Virol. (1989) 63: 1651-1660), the polio leader sequence, the hepatitis A virus leader, the hepatitis C virus IRES, human rhinovirus type 2 IRES (Dobrikova et al., Proc. Natl. Acad. Sci. (2003) 100(25): 15125-15130), an IRES element from the foot and mouth disease virus (Ramesh et al., Nucl. Acid Res. (1996) 24:2697-2700), a giardiavirus IRES (Garlapati et al., J. Biol. Chem. (2004) 279(5):3389-3397), and the like.

[0277] In some embodiments, the IRES is an IRES sequence of Taura syndrome virus, Triatoma virus, Theiler's encephalomyelitis virus, Simian Virus 40, Solenopsis invicta virus 1, Rhopalosiphum padi virus, Reticuloendotheliosis virus, Human poliovirus 1, Plautia stali intestine virus, Kashmir bee virus, Human rhinovirus 2, Homalodisca coagulata virus-1, Human Immunodeficiency Virus type 1, Himetobi P virus, Hepatitis C virus, Hepatitis A virus, Hepatitis GB virus, Foot and mouth disease virus, Human enterovirus 71, Equine rhinitis virus, Ectropis obliqua picorna-like virus, Encephalomyocarditis virus, Drosophila C Virus, Human coxsackievirus B3, Crucifer tobamovirus, Cricket paralysis virus, Bovine viral diarrhea virus 1, Black Queen Cell Virus, Aphid lethal paralysis virus, Avian encephalomyelitis virus, Acute bee paralysis virus, Hibiscus chlorotic ringspot virus, Classical swine fever virus, Human FGF2, Human SFTPA1, Human AML1/RUNX1, Drosophila antennapedia, Human AQP4, Human AT1R, Human BAG-1, Human BCL2, Human BiP, Human c-IAP1, Human c-myc, Human eIF4G, Mouse NDST4L, Human LEF1, Mouse HIF1 alpha, Human n.myc, Mouse Gtx, Human p27kip1, Human PDGF2/c-sis, Human p53, Human Pim-1, Mouse Rbm3, Drosophila reaper, Canine Scamper, Drosophila Ubx, Human UNR, Mouse UtrA, Human VEGF-A, Human XIAP, Drosophila hairless, S. cerevisiae TFIID, S. cerevisiae YAP1, tobacco etch virus, turnip crinkle virus, EMCV-A, EMCV-B, EMCV-Bf, EMCV-Cf, EMCV pEC9, Picobirnavirus, HCV QC64, Human Cosavirus E/D, Human Cosavirus F, Human Cosavirus JMY, Rhinovirus NAT001, HRV14, HRV89, HRVC-02, HRV-A21, Salivirus A SH1, Salivirus FHB, Salivirus NG-J1, Human Parechovirus 1, Crohivirus B, Yc-3, Rosavirus M-7, Shanbavirus A, Pasivirus A, Pasivirus A 2, Echovirus E14, Human Parechovirus 5, Aichi Virus, Hepatitis A Virus HA16, Phopivirus, CVA10, Enterovirus C, Enterovirus D, Enterovirus J, Human Pegivirus 2, GBV-C GT110, GBV-C K1737, GBV-C Iowa, Pegivirus A 1220, Pasivirus A 3, Sapelovirus, Rosavirus B, Bakunsa Virus, Tremovirus A, Swine Pasivirus 1, PLV-CHN, Pasivirus A, Sicinivirus, Hepacivirus K, Hepacivirus A, BVDV1, Border Disease Virus, BVDV2, CSFV-PK15C, SF573 Dicistrovirus, Hubei Picorna-like Virus, CRPV, Salivirus A BN5, Salivirus A BN2, Salivirus A 02394, Salivirus A GUT, Salivirus A CH, Salivirus A SZ1, Salivirus FHB, CVB3, CVB1, Echovirus 7, CVB5, EVA71, CVA3, CVA12, EV24 or an aptamer to eIF4G.

[0278] In some embodiments, the polynucleotides herein comprise an expression sequence. In some embodiments, the expression sequence encodes a therapeutic protein.

[0279] In some embodiments, the circular RNA encodes two or more polypeptides. In some embodiments, the circular RNA is a bicistronic RNA. The sequences encoding the two or more polypeptides can be separated by a ribosomal skipping element or a nucleotide sequence encoding a protease cleavage site. In certain embodiments, the ribosomai skipping element encodes thosea-asigna virus 2A peptide (T2A), porcine teschovirus-1 2 A peptide (P2A), foot-and-mouth disease virus 2 A peptide (F2A), equine rhinitis A vims 2A peptide (E2A), cytoplasmic polyhedrosis vims 2A peptide (BmCPV 2A), or flacherie vims of B. mori 2A peptide (BmIFV 2A).

[0280] In certain embodiments, the vectors provided herein comprise a 3′ UTR. In some embodiments, the 3′ UTR is from human beta globin, human alpha globin xenopus beta globin, xenopus alpha globin, human prolactin, human GAP-43, human eEFlal, human Tau, human TNFα, dengue virus, hantavirus small mRNA, bunyavirus small mRNA, turnip yellow mosaic virus, hepatitis C virus, rubella virus, tobacco mosaic virus, human IL-8, human actin, human GAPDH, human tubulin, hibiscus chlorotic ringspot virus, woodchuck hepatitis virus post translationally regulated element, sindbis virus, turnip crinkle virus, tobacco etch virus, or Venezuelan equine encephalitis virus.

[0281] In some embodiments, the vectors provided herein comprise a 5′ UTR. In some embodiments, the 5′ UTR is from human beta globin, Xenopus laevis beta globin, human alpha globin, Xenopus laevis alpha globin, rubella virus, tobacco mosaic virus, mouse Gtx, dengue virus, heat shock protein 70 kDa protein 1A, tobacco alcohol dehydrogenase, tobacco etch virus, turnip crinkle virus, or the adenovirus tripartite leader.

[0282] In some embodiments, a vector provided herein comprises a polyA region external of the 3′ and/or 5′ group I intron fragments. In some embodiments the polyA region is at least 15, 30, or 60 nucleotides long. In some embodiments, one or both polyA regions is 15-50 nucleotides long. In some embodiments, one or both polyA regions is 20-25 nucleotides long. The polyA sequence is removed upon circularization. Thus, an oligonucleotide hybridizing with the polyA sequence, such as a deoxythymine oligonucleotide (oligo(dT)) conjugated to a solid surface (e.g., a resin), can be used to separate circular RNA from its precursor RNA. Other sequences can also be disposed 5′ to the 3′ group I intron fragment or 3′ to the 5′ group I intron fragment and a complementary sequence can similarly be used for circular RNA purification.

[0283] In some embodiments, the DNA (e.g., vector), linear RNA (e.g., precursor RNA), and/or circular RNA polynucleotide provided herein is between 300 and 10000, 400 and 9000, 500 and 8000, 600 and 7000, 700 and 6000, 800 and 5000, 900 and 5000, 1000 and 5000, 1100 and 5000, 1200 and 5000, 1300 and 5000, 1400 and 5000, and/or 1500 and 5000 nucleotides in length. In some embodiments, the polynucleotide is at least 300 nt, 400 nt, 500 nt, 600 nt, 700 nt, 800 nt, 900 nt, 1000 nt, 1100 nt, 1200 nt, 1300 nt, 1400 nt, 1500 nt, 2000 nt, 2500 nt, 3000 nt, 3500 nt, 4000 nt, 4500 nt, or 5000 nt in length. In some embodiments, the polynucleotide is no more than 3000 nt, 3500 nt, 4000 nt, 4500 nt, 5000 nt, 6000 nt, 7000 nt, 8000 nt, 9000 nt, or 10000 nt in length. In some embodiments, the length of a DNA, linear RNA, and/or circular RNA polynucleotide provided herein is about 300 nt, 400 nt, 500 nt, 600 nt, 700 nt, 800 nt, 900 nt, 1000 nt, 1100 nt, 1200 nt, 1300 nt, 1400 nt, 1500 nt, 2000 nt, 2500 nt, 3000 nt, 3500 nt, 4000 nt, 4500 nt, 5000 nt, 6000 nt, 7000 nt, 8000 nt, 9000 nt, or 10000 nt.

[0284] In some embodiments, provided herein is a vector. In certain embodiments, the vector comprises, in the following order, a) a 5′ homology region, b) a 3′ group I intron fragment, c) optionally, a first spacer sequence, d) an IRES, e) an expression sequence, f) optionally, a second spacer sequence, g) a 5′ group I intron fragment, and h) a 3′ homology region. In some embodiments, the vector comprises a transcriptional promoter upstream of the 5′ homology region. In certain embodiments, the precursor RNA comprises, in the following order, a) a polyA sequence, b) an external spacer, c) a 3′ group I intron fragment, d) a duplex forming region, e) an internal spacer, f) an IRES, g) an expression sequence, h) a stop codon cassette, i) optionally, an internal spacer, j) a duplex forming region capable of forming a duplex with the duplex forming region of d, k) a 5′ group I intron fragment, 1) an external spacer, and m) a polyA sequence.

[0285] In some embodiments, provided herein is a precursor RNA. In certain embodiments, the precursor RNA is a linear RNA produced by in vitro transcription of a vector provided herein. In some embodiments, the precursor RNA comprises, in the following order, a) a 5′ homology region, b) a 3′ group I intron fragment, c) optionally, a first spacer sequence, d) an IRES, e) an expression sequence, f) optionally, a second spacer sequence, g) a 5′ group I intron fragment, and h) a 3′ homology region. The precursor RNA can be unmodified, partially modified or completely modified.

[0286] In certain embodiments, provided herein is a circular RNA. In certain embodiments, the circular RNA is a circular RNA produced by a vector provided herein. In some embodiments, the circular RNA is circular RNA produced by circularization of a precursor RNA provided herein. In some embodiments, the circular RNA comprises, in the following sequence, a) a first spacer sequence, b) an IRES, c) an expression sequence, and d) a second spacer sequence. In some embodiments, the circular RNA further comprises the portion of the 3′ group I intron fragment that is 3′ of the 3′ splice site. In some embodiments, the circular RNA further comprises the portion of the 5′ group I intron fragment that is 5′ of the 5′ splice site. In some embodiments, the circular RNA is at least 500, 600, 700, 800, 900, 1000, 1500, 2000, 2500, 3000, 3500, 4000 or 4500 nucleotides in size. The circular RNA can be unmodified, partially modified or completely modified.

[0287] In some embodiments, the circular RNA provided herein has higher functional stability than mRNA comprising the same expression sequence. In some embodiments, the circular RNA provided herein has higher functional stability than mRNA comprising the same expression sequence, 5moU modifications, an optimized UTR, a cap, and/or a polyA tail.

[0288] In some embodiments, the circular RNA polynucleotide provided herein has a functional half-life of at least 5 hours, 10 hours, 15 hours, 20 hours. 30 hours, 40 hours, 50 hours, 60 hours, 70 hours or 80 hours. In some embodiments, the circular RNA polynucleotide provided herein has a functional half-life of 5-80, 10-70, 15-60, and/or 20-50 hours. In some embodiments, the circular RNA polynucleotide provided herein has a functional half-life greater than (e.g., at least 1.5-fold greater than, at least 2-fold greater than) that of an equivalent linear RNA polynucleotide encoding the same protein. In some embodiments, functional half-life can be assessed through the detection of functional protein synthesis.

[0289] In some embodiments, the circular RNA polynucleotide provided herein has a half-life of at least 5 hours, 10 hours, 15 hours, 20 hours. 30 hours, 40 hours, 50 hours, 60 hours, 70 hours or 80 hours. In some embodiments, the circular RNA polynucleotide provided herein has a half-life of 5-80, 10-70, 15-60, and/or 20-50 hours. In some embodiments, the circular RNA polynucleotide provided herein has a half-life greater than (e.g., at least 1.5-fold greater than, at least 2-fold greater than) that of an equivalent linear RNA polynucleotide encoding the same protein. In some embodiments, the circular RNA polynucleotide, or pharmaceutical composition thereof, has a functional half-life in a human cell greater than or equal to that of a pre-determined threshold value. In some embodiments the functional half-life is determined by a functional protein assay. For example in some embodiments, the functional half-life is determined by an in vitro luciferase assay, wherein the activity of Gaussia luciferase (GLuc) is measured in the media of human cells (e.g. HepG2) expressing the circular RNA polynucleotide every 1, 2, 6, 12, or 24 hours over 1, 2, 3, 4, 5, 6, 7, or 14 days. In other embodiments, the functional half-life is determined by an in vivo assay, wherein levels of a protein encoded by the expression sequence of the circular RNA polynucleotide are measured in patient serum or tissue samples every 1, 2, 6, 12, or 24 hours over 1, 2, 3, 4, 5, 6, 7, or 14 days. In some embodiments, the pre-determined threshold value is the functional half-life of a reference linear RNA polynucleotide comprising the same expression sequence as the circular RNA polynucleotide.

[0290] In some embodiments, the circular RNA provided herein may have a higher magnitude of expression than equivalent linear mRNA, e.g., a higher magnitude of expression 24 hours after administration of RNA to cells. In some embodiments, the circular RNA provided herein has a higher magnitude of expression than mRNA comprising the same expression sequence, 5moU modifications, an optimized UTR, a cap, and/or a polyA tail.

[0291] In some embodiments, the circular RNA provided herein may be less immunogenic than an equivalent mRNA when exposed to an immune system of an organism or a certain type of immune cell. In some embodiments, the circular RNA provided herein is associated with modulated production of cytokines when exposed to an immune system of an organism or a certain type of immune cell. For example, in some embodiments, the circular RNA provided herein is associated with reduced production of IFN-β1, RIG-I, IL-2, IL-6, IFNγ, and/or TNFα when exposed to an immune system of an organism or a certain type of immune cell as compared to mRNA comprising the same expression sequence. In some embodiments, the circular RNA provided herein is associated with less IFN-β1, RIG-I, IL-2, IL-6, IFNγ, and/or TNFα transcript induction when exposed to an immune system of an organism or a certain type of immune cell as compared to mRNA comprising the same expression sequence. In some embodiments, the circular RNA provided herein is less immunogenic than mRNA comprising the same expression sequence. In some embodiments, the circular RNA provided herein is less immunogenic than mRNA comprising the same expression sequence, 5moU modifications, an optimized UTR, a cap, and/or a polyA tail.

[0292] In certain embodiments, the circular RNA provided herein can be transfected into a cell as is, or can be transfected in DNA vector form and transcribed in the cell. Transcription of circular RNA from a transfected DNA vector can be via added polymerases or poylmerases encoded by nucleic acids transfected into the cell, or preferably via endogenous polymerases.

[0293] In certain embodiments, a circular RNA polynucleotide provided herein comprises modified RNA nucleotides and/or modified nucleosides. In some embodiments, the modified nucleoside is m⁵C (5-methylcytidine). In another embodiment, the modified nucleoside is m⁵U (5-methyluridine). In another embodiment, the modified nucleoside is m⁶A (N⁶-methyladenosine). In another embodiment, the modified nucleoside is s²U (2-thiouridine). In another embodiment, the modified nucleoside is (pseudouridine). In another embodiment, the modified nucleoside is Um (2′-O-methyluridine). In other embodiments, the modified nucleoside is m¹A (1-methyladenosine); m²A (2-methyladenosine); Am (2′-O-methyladenosine); ms² m⁶A (2-methylthio-N⁶-methyladenosine); i⁶A (N⁶-isopentenyladenosine); ms²i6A (2-methylthio-N⁶ isopentenyladenosine); io⁶A (N⁶-(cis-hydroxyisopentenyl)adenosine); ms²t⁶A (2-methylthio-N⁶-(cis-hydroxyisopentenyl)adenosine); g⁶A (N⁶-glycinylcarbamoyladenosine); t⁶A (N⁶-threonylcarbamoyladenosine); ms²t⁶A (2-methylthio-N⁶-threonyl carbamoyladenosine); m⁶t⁶A (N⁶-methyl-N⁶-threonylcarbamoyladenosine); hn⁶A(N⁶-hydroxynorvalylcarbamoyladenosine); ms²hn⁶A (2-methylthio-N⁶-hydroxynorvalyl carbamoyladenosine); Ar(p) (2′-O-ribosyladenosine (phosphate)); I (inosine); m¹I (1-methylinosine); m¹Im (1,2′-O-dimethylinosine); m³C (3-methylcytidine); Cm (2′-O-methylcytidine); s²C (2-thiocytidine); ac⁴C (N⁴-acetylcytidine); f⁵C (5-formylcytidine); m⁵Cm (5,2′-O-dimethylcytidine); ac⁴Cm (N⁴-acetyl-2′-O-methylcytidine); k²C (lysidine); m¹G (1-methylguanosine); m²G (N²-methylguanosine); m⁷G (7-methylguanosine); Gm (2′-O-methylguanosine); m²₂G (N²,N²-dimethylguanosine); m²Gm (N²,2′-O-dimethylguanosine); m²₂Gm (N²,N²,2′-O-trimethylguanosine); Gr(p) (2′-O-ribosylguanosine(phosphate)); yW (wybutosine); o₂yW (peroxywybutosine); OHyW (hydroxywybutosine); OHyW* (undermodified hydroxywybutosine); imG (wyosine); mimG (methylwyosine); Q (queuosine); oQ (epoxyqueuosine); galQ (galactosyl-queuosine); manQ (mannosyl-queuosine); preQ₀ (7-cyano-7-deazaguanosine); preQ₁ (7-aminomethyl-7-deazaguanosine); G⁺ (archaeosine); D (dihydrouridine); m⁵Um (5,2′-O-dimethyluridine); s⁴U (4-thiouridine); m⁵s²U (5-methyl-2-thiouridine); s²Um (2-thio-2′-O-methyluridine); acp³U (3-(3-amino-3-carboxypropyl)uridine); ho⁵U (5-hydroxyuridine); mo⁵U (5-methoxyuridine); cmo⁵U (uridine 5-oxyacetic acid); mcmo⁵U (uridine 5-oxyacetic acid methyl ester); chm⁵U (5-(carboxyhydroxymethyl)uridine)); mchm⁵U (5-(carboxyhydroxymethyl)uridine methyl ester); mcm⁵U (5-methoxycarbonylmethyluridine); mcm⁵Um (5-methoxycarbonylmethyl-2′-O-methyluridine); mcm⁵s²U (5-methoxycarbonylmethyl-2-thiouridine); nm⁵S²U (5-aminomethyl-2-thiouridine); mnm⁵U (5-methylaminomethyluridine); mnm⁵s²U (5-methylaminomethyl-2-thiouridine); mnm⁵se²U (5-methylaminomethyl-2-selenouridine); ncm⁵U (5-carbamoylmethyluridine); ncm⁵Um (5-carbamoylmethyl-2′-O-methyluridine); cmnm⁵U (5-carboxymethylaminomethyluridine); cmnm⁵Um (5-carboxymethylaminomethyl-2′-O-methyluridine); cmnm⁵s²U (5-carboxymethylaminomethyl-2-thiouridine); m⁶₂A (N⁶,N⁶-dimethyladenosine); Im (2′-O-methylinosine); m⁴C (N⁴-methylcytidine); m⁴Cm (N⁴,2′-O-dimethylcytidine); hm⁵C (5-hydroxymethylcytidine); m³U (3-methyluridine); cm⁵U (5-carboxymethyluridine); m⁶Am (N⁶,2′-O-dimethyladenosine); m⁶₂Am (N⁶,N⁶,O-2′-trimethyladenosine); m^{2,7}G (N²,7-dimethylguanosine); m^{2,2,7}G (N²,N²,7-trimethylguanosine); m³Um (3,2′-O-dimethyluridine); m⁵D (5-methyldihydrouridine); f⁵Cm (5-formyl-2′-O-methylcytidine); m¹Gm (1,2′-O-dimethylguanosine); m¹Am (1,2′-O-dimethyladenosine); τm⁵U (5-taurinomethyluridine); τm⁵s²U (5-taurinomethyl-2-thiouridine)); imG-14 (4-demethylwyosine); imG2 (isowyosine); or ac⁶A (N⁶-acetyladenosine).

[0294] In some embodiments, the modified nucleoside may include a compound selected from the group of: pyridin-4-one ribonucleoside, 5-aza-uridine, 2-thio-5-aza-uridine, 2-thiouridine, 4-thio-pseudouridine, 2-thio-pseudouridine, 5-hydroxyuridine, 3-methyluridine, 5-carboxymethyl-uridine, 1-carboxymethyl-pseudouridine, 5-propynyl-uridine, 1-propynyl-pseudouridine, 5-taurinomethyluridine, 1-taurinomethyl-pseudouridine, 5-taurinomethyl-2-thio-uridine, 1-taurinomethyl-4-thio-uridine, 5-methyl-uridine, 1-methyl-pseudouridine, 4-thio-1-methyl-pseudouridine, 2-thio-1-methyl-pseudouridine, 1-methyl-1-deaza-pseudouridine, 2-thio-1-methyl-1-deaza-pseudouridine, dihydrouridine, dihydropseudouridine, 2-thio-dihydrouridine, 2-thio-dihydropseudouridine, 2-methoxyuridine, 2-methoxy-4-thio-uridine, 4-methoxy-pseudouridine, 4-methoxy-2-thio-pseudouridine, 5-aza-cytidine, pseudoisocytidine, 3-methyl-cytidine, N4-acetylcytidine, 5-formylcytidine, N4-methylcytidine, 5-hydroxymethylcytidine, 1-methyl-pseudoisocytidine, pyrrolo-cytidine, pyrrolo-pseudoisocytidine, 2-thio-cytidine, 2-thio-5-methyl-cytidine, 4-thio-pseudoisocytidine, 4-thio-1-methyl-pseudoisocytidine, 4-thio-1-methyl-1-deaza-pseudoisocytidine, 1-methyl-1-deaza-pseudoisocytidine, zebularine, 5-aza-zebularine, 5-methyl-zebularine, 5-aza-2-thio-zebularine, 2-thio-zebularine, 2-methoxy-cytidine, 2-methoxy-5-methyl-cytidine, 4-methoxy-pseudoisocytidine, 4-methoxy-1-methyl-pseudoisocytidine, 2-aminopurine, 2,6-diaminopurine, 7-deaza-adenine, 7-deaza-8-aza-adenine, 7-deaza-2-aminopurine, 7-deaza-8-aza-2-aminopurine, 7-deaza-2,6-diaminopurine, 7-deaza-8-aza-2,6-diaminopurine, 1-methyladenosine, N6-methyladenosine, N6-isopentenyladenosine, N6-(cis-hydroxyisopentenyl)adenosine, 2-methylthio-N6-(cis-hydroxyisopentenyl) adenosine, N6-glycinylcarbamoyladenosine, N6-threonylcarbamoyladenosine, 2-methylthio-N6-threonyl carbamoyladenosine, N6,N6-dimethyladenosine, 7-methyladenine, 2-methylthio-adenine, 2-methoxy-adenine, inosine, 1-methyl-inosine, wyosine, wybutosine, 7-deaza-guanosine, 7-deaza-8-aza-guanosine, 6-thio-guanosine, 6-thio-7-deaza-guanosine, 6-thio-7-deaza-8-aza-guanosine, 7-methyl-guanosine, 6-thio-7-methyl-guanosine, 7-methylinosine, 6-methoxy-guanosine, 1-methylguanosine, N2-methylguanosine, N2,N2-dimethylguanosine, 8-oxo-guanosine, 7-methyl-8-oxo-guanosine, 1-methyl-6-thio-guanosine, N2-methyl-6-thio-guanosine, and N2,N2-dimethyl-6-thio-guanosine. In another embodiment, the modifications are independently selected from the group consisting of 5-methylcytosine, pseudouridine and 1-methylpseudouridine.

[0295] In some embodiments, the modified ribonucleosides include 5-methylcytidine, 5-methoxyuridine, 1-methyl-pseudouridine, N6-methyladenosine, and/or pseudouridine. In some embodiments, such modified nucleosides provide additional stability and resistance to immune activation.

[0296] In particular embodiments, polynucleotides may be codon-optimized. A codon optimized sequence may be one in which codons in a polynucleotide encoding a polypeptide have been substituted in order to increase the expression, stability and/or activity of the polypeptide. Factors that influence codon optimization include, but are not limited to one or more of: (i) variation of codon biases between two or more organisms or genes or synthetically constructed bias tables, (ii) variation in the degree of codon bias within an organism, gene, or set of genes, (iii) systematic variation of codons including context, (iv) variation of codons according to their decoding tRNAs, (v) variation of codons according to GC %, either overall or in one position of the triplet, (vi) variation in degree of similarity to a reference sequence for example a naturally occurring sequence, (vii) variation in the codon frequency cutoff, (viii) structural properties of mRNAs transcribed from the DNA sequence, (ix) prior knowledge about the function of the DNA sequences upon which design of the codon substitution set is to be based, and/or (x) systematic variation of codon sets for each amino acid. In some embodiments, a codon optimized polynucleotide may minimize ribozyme collisions and/or limit structural interference between the expression sequence and the IRES.

[0297] In certain embodiments circular RNA provided herein is produced inside a cell. In some embodiments, precursor RNA is transcribed using a DNA template (e.g., in some embodiments, using a vector provided herein) in the cytoplasm by a bacteriophage RNA polymerase, or in the nucleus by host RNA polymerase II and then circularized.

[0298] In certain embodiments, the circular RNA provided herein is injected into an animal (e.g., a human), such that a polypeptide encoded by the circular RNA molecule is expressed inside the animal.

### 3. Payload

[0299] In some embodiments, the expression sequence encodes a therapeutic protein. In some embodiments, the therapeutic protein is selected from the proteins listed in the following table.

| | | Target | |
|---|---|---|---|
| | | cell/ | |
| Payload | Sequence | organ | Preferred delivery formulation |
| CD19 CAR | Any of sequences 309-314 | T cells | [chemical structure] |
| BCMA CAR | MALPVTALLLPLALLL HAARPDIVLTQSPASLA VSLGERATINCRASESV SVIGAHLIHWYQQKPG QPPKLLIYLASNLETGV PARFSGSGSGTDFTLTIS SLQAEDAAIYYCLQSRI FPRTFGQGTKLEIKGST SGSGKPGSGEGSTKGQ VQLVQSGSELKKPGAS VKVSCKASGYTFTDYI NWVRQAPGQGLEWMG WINTETREPAYAYDFR GRFVFSLDTSVSTAYLQ ISSLKAEDTAVYYCAR DYSYAMDYWGQGTLV | T cells | [chemical structure] |
| | TVSSAAATTTPAPRPPT | | |
| | PAPTIASQPLSLRPEACR | | |
| | PAAGGAVHTRGLDFAC | | |
| | DIYIWAPLAGTCGVLLL | | |
| | SLVITLYCKRGRKKLLY | | |
| | IFKQPFMRPVQTTQEED | | |
| | GCSCRFPEEEEGGCELR | | |
| | VKFSRSADAPAYQQGQ | | |
| | NQLYNELNLGRREEYD | | |
| | VLDKRRGRDPEMGGKP | | |
| | RRKNPQEGLYNELQKD | | |
| | KMAEAYSEIGMKGERR | | |
| | RGKGHDGLYQGLSTAT | | |
| | KDTYDALHMQALPPR | | |
| MAGE- A4 TCR | TCR alpha chain: KNQVEQSPQSLIILEGK NCTLQCNYTVSPFSNLR WYKQDTGRGPVSLTIM TFSENTKSNGRYTATLD ADTKQSSLHITASQLSD SASYICVVNHSGGSYIP TFGRGTSLIVHPYIQKP DPAVYQLRDSKSSDKS VCLFTDFDSQTNVSQSK DSDVYITDKTVLDMRS MDFKSNSAVAWSNKS DFACANAFNNSIIPEDT FFPSPESS TCR beta chain: DVKVTQSSRYLVKRTG | T cells | [chemical structure] |
| | EKVFLECVQDMDHEN | | |
| | MFWYRQDPGLGLRLIY | | |
| | FSYDVKMKEKGDIPEG | | |
| | YSVSREKKERFSLILES | | |
| | ASTNQTSMYLCASSFL | | |
| | MTSGDPYEQYFGPGTR | | |
| | LTVTEDLKNVFPPEVA | | |
| | VFEPSEAEISHTQKATL | | |
| | VCLATGFYPDHVELSW | | |
| | WVNGKEVHSGVSTDPQ | | |
| | PLKEQPALNDSRYCLSS | | |
| | RLRVSATFWQNPRNHF | | |
| | RCQVQFYGLSENDEWT | | |
| | QDRAKPVTQIVSAEAW | | |
| | GRAD | | |
| NY- ESO TCR | TCRalpha extracellular sequence MQEVTQIPAALSVPEGE NLVLNCSFTDSAIYNLQ WFRQDPGKGLTSLLLIQ SSQREQTSGRLNASLDK SSGRSTLYIAASQPGDS ATYLCAVRPTSGGSYIP TFGRGTSLIVHPY TCRbeta cellular sequence MGVTQTPKFQVLKTGQ SMTLQCAQDMNHEYM SWYRQDPGMGLRLIHY SVGAGITDQGEVPNGY NVSRSTTEDFPLRLLSA | T cells | [chemical structure] |
| | APSQTSVYFCASSYVG | | |
| | NTGELFFGEGSRLTVL | | |
| EPO | APPRLICDSRVLERYLL | Kidney | |
| | EAKEAENITTGCAEHCS | or | |
| | LNENITVPDTKVNFYA | bone | |
| | WKRMEVGQQAVEVW | marrow | |
| | QGLALLSEAVLRGQAL | | |
| | LVNSSQPWEPLQLHVD | | |
| | KAVSGLRSLTTLLRALG | | |
| | AQKEAISPPDAASAAPL | | |
| | RTITADTFRKLFRVYSN | | |
| | FLRGKLKLYTGEACRT | | |
| | GDR | | |
| PAH | MSTAVLENPGLGRKLS DFGQETSYIEDNCNQN GAISLIFSLKEEVGALA KVLRLFEENDVNLTHIE SRPSRLKKDEYEFFTHL DKRSLPALTNIIKILRHD IGATVHELSRDKKKDT VPWFPRTIQELDRFANQ ILSYGAELDADHPGFKD PVYRARRKQFADIAYN YRHGQPIPRVEYMEEE KKTWGTVFKTLKSLYK THACYEYNHIFPLLEKY CGFHEDNIPQLEDVSQF LQTCTGFRLRPVAGLLS SRDFLGGLAFRVFHCT QYIRHGSKPMYTPEPDI CHELLGHVPLFSDRSFA QFSQEIGLASLGAPDEY IEKLATIYWFTVEFGLC KQGDSIKAYGAGLLSF | Hepatic cells | [chemical structure] |
| | GELQYCLSEDPKLLPLE | | |
| | LEKTAIQNYTVTEFQPL | | |
| | YYVAESFNDAKEKVRN | | |
| | FAATIPRPFSVRYDPYT | | |
| | QRIEVLDNTQQLKILAD | | |
| | SINSEIGILCSALQKIK | | |
| CPS 1 | LSVKAQTAHIVLEDGT KMKGYSFGHPSSVAGE VVFNTGLGGYPEAITDP AYKGQILTMANPIIGNG GAPDTTALDELGLSKY KDYNHWLATSLGQW LQEEKVPAIYGVDTRM LTKIIRDKGTMLGKEIF EGQPVDFVDPNKQNLI AEVSTKDVKVYGKGNP TKVVAVDCGIKNNVIR LLVKRGAEVHLVPWN HDFTKMEYDGILIAGGP GNPALAEPLIQNVRKIL ESDRKEPLFGISTGNLIT GLAAGAKTYKMSMAN RGQNQPVLNITNKQAFI TAQNHGYALDNTLPAG WKPLFVNVNDQTNEGI MHESKPFFAVQFHPEV TPGPIDTEYLFDSFFSLI KKGKATTITSVLPKPAL | Hepatic cells | [chemical structure] |
| | VASRVEVSKVLILGSGG | | |
| | LSIGQAGEFDYSGSQAV | | |
| | KAMKEENVKTVLMNP | | |
| | NIASVQTNEVGLKQAD | | |
| | TVYFLPITPQFVTEVIKA | | |
| | EQPDGLILGMGGQTAL | | |
| | NCGVELFKRGVLKEYG | | |
| | VKVLGTSVESIMATED | | |
| | RQLFSDKLNEINEKIAPS | | |
| | FAVESIEDALKAADTIG | | |
| | YPVMIRSAYALGGLGS | | |
| | GICPNRETLMDLSTKAF | | |
| | AMTNQILVEKSVTGWK | | |
| | EIEYEVVRDADDNCVT | | |
| | VCNMENVDAMGVHTG | | |
| | DSVVVAPAQTLSNAEF | | |
| | QMLRRTSINVVRHLGIV | | |
| | GECNIQFALHPTSMEYC | | |
| | IIEVNARLSRSSALASK | | |
| | ATGYPLAFIAAKIALGIP | | |
| | LPEIKNVVSGKTSACFE | | |
| | PSLDYMVTKIPRWDLD | | |
| | RFHGTSSRIGSSMKSVG | | |
| | EVMAIGRTFEESFQKAL | | |
| | RMCHPSIEGFTPRLPMN | | |
| | KEWPSNLDLRKELSEPS | | |
| | STRIYAIAKAIDDNMSL | | |
| | DEIEKLTYIDKWFLYK | | |
| | MRDILNMEKTLKGLNS | | |
| | ESMTEETLKRAKEIGFS | | |
| | DKQISKCLGLTEAQTRE | | |
| | LRLKKNIHPWVKQIDTL | | |
| | AAEYPSVTNYLYVTYN | | |
| | GQEHDVNFDDHGMMV | | |
| | LGCGPYHIGSSVEFDW | | |
| | CAVSSIRTLRQLGKKTV | | |
| | VVNCNPETVSTDFDEC | | |
| | DKLYFEELSLERILDIYH | | |
| | QEACGGCIISVGGQIPN | | |
| | NLAVPLYKNGVKIMGT | | |
| | SPLQIDRAEDRSIFSAVL | | |
| | DELKVAQAPWKAVNT | | |
| | LNEALEFAKSVDYPCLL | | |
| | RPSYVLSGSAMNVVFS | | |
| | EDEMKKFLEEATRVSQ | | |
| | EHPVVLTKFVEGAREV | | |
| | EMDAVGDKGRVISHAI | | |
| | SEHVEDAGVHSGDATL | | |
| | MLPTQTISQGAIEKVKD | | |
| | ATRKIAKAFAISGPFNV | | |
| | QFLVKGNDVLVIECNL | | |
| | RASRSFPFVSKTLGVDF | | |
| | IDVATKVMIGENVDEK | | |
| | HLPTLDHPIIPADYVAIK | | |
| | APMFSWPRLRDADPILR | | |
| | CEMASTGEVACFGEGI | | |
| | HTAFLKAMLSTGFKIPQ | | |
| | KGILIGIQQSFRPRFLGV | | |
| | AEQLHNEGFKLFATEA | | |
| | TSDWLNANNVPATVA | | |
| | WPSQEGQNPSLSSIRKLI | | |
| | RDGSIDLVINLPNNNTK | | |
| | FVHDNYVIRRTAVDSGI | | |
| | PLLTNFQVTKLFAEAV | | |
| | QKSRKVDSKSLFHYRQ | | |
| | YSAGKAA | | |
| Cas9 | MKRNYILGLDIGITSVG YGIIDYETRDVIDAGVR LFKEANVENNEGRRSK RGARRLKRRRRHRIQR VKKLLFDYNLLTDHSE LSGINPYEARVKGLSQK LSEEEFSAALLHLAKRR GVHNVNEVEEDTGNEL STKEQISRNSKALEEKY VAELQLERLKKDGEVR GSINRFKTSDYVKEAK QLLKVQKAYHQLDQSF IDTYIDLLETRRTYYEG PGEGSPFGWKDIKEWY EMLMGHCTYFPEELRS VKYAYNADLYNALND | Im- mune cells | [chemical structure] |
| | LNNLVITRDENEKLEYY | | |
| | EKFQIIENVFKQKKKPT | | |
| | LKQIAKEILVNEEDIKG | | |
| | YRVTSTGKPEFTNLKV | | |
| | YHDIKDITARKEIINAE | | |
| | LLDQIAKILTIYQSSEDI | | |
| | QEELTNLNSELTQEEIE | | |
| | QISNLKGYTGTHNLSLK | | |
| | AINLILDELWHTNDNQI | | |
| | AIFNRLKLVPKKVDLSQ | | |
| | QKEIPTTLVDDFILSPVV | | |
| | KRSFIQSIKVINAIIKKY | | |
| | GLPNDIIIELAREKNSKD | | |
| | AQKMINEMQKRNRQT | | |
| | NERIEEIIRTTGKENAKY | | |
| | LIEKIKLHDMQEGKCLY | | |
| | SLEAIPLEDLLNNPFNY | | |
| | EVDHIIPRSVSFDNSFNN | | |
| | KVLVKQEENSKKGNRT | | |
| | PFQYLSSSDSKISYETFK | | |
| | KHILNLAKGKGRISKTK | | |
| | KEYLLEERDINRFSVQK | | |
| | DFINRNLVDTRYATRG | | |
| | LMNLLRSYFRVNNLDV | | |
| | KVKSINGGFTSFLRRK | | |
| | WKFKKERNKGYKHHA | | |
| | EDALIIANADFIFKEWK | | |
| | KLDKAKKVMENQMFE | | |
| | EKQAESMPEIETEQEYK | | |
| | EIFITPHQIKHIKDFKDY | | |
| | KYSHRVDKKPNRELIN | | |
| | DTLYSTRKDDKGNTLI | | |
| | VNNLNGLYDKDNDKL | | |
| | KKLINKSPEKLLMYHH | | |
| | DPQTYQKLKLIMEQYG | | |
| | DEKNPLYKYYEETGNY | | |
| | LTKYSKKDNGPVIKKIK | | |
| | YYGNKLNAHLDITDDY | | |
| | PNSRNKVVKLSLKPYR | | |
| | FDVYLDNGVYKFVTVK | | |
| | NLDVIKKENYYEVNSK | | |
| | CYEEAKKLKKISNQAEF | | |
| | IASFYNNDLIKINGELY | | |
| | RVIGVNNDLLNRIEVN | | |
| | MIDITYREYLENMNDK | | |
| | RPPRIIKTIASKTQSIKK | | |
| | YSTDILGNLYEVKSKK | | |
| | HPQIIKKG | | |
| ADAM TS13 | AAGGILHLELLVAVGP DVFQAHQEDTERYVLT NLNIGAELLRDPSLGAQ FRVHLVKMVILTEPEG APNITANLTSSLLSVCG WSQTINPEDDTDPGHA DLVLYITRFDLELPDGN RQVRGVTQLGGACSPT WSCLITEDTGFDLGVTI AHEIGHSFGLEHDGAPG SGCGPSGHVMASDGAA PRAGLAWSPCSRRQLL SLLSAGRARCVWDPPR PQPGSAGHPPDAQPGL YYSANEQCRVAFGPKA VACTFAREHLDMCQAL SCHTDPLDQSSCSRLLV PLLDGTECGVEKWCSK GRCRSLVELTPIAAVHG RWSSWGPRSPCSRSCG GGVVTRRRQCNNPRPA | Hepatic cells | [chemical structure] |
| | FGGRACVGADLQAEM | | |
| | CNTQACEKTQLEFMSQ | | |
| | QCARTDGQPLRSSPGG | | |
| | ASFYHWGAAVPHSQG | | |
| | DALCRHMCRAIGESFIM | | |
| | KRGDSFLDGTRCMPSG | | |
| | PREDGTLSLCVSGSCRT | | |
| | FGCDGRMDSQQVWDR | | |
| | CQVCGGDNSTCSPRKG | | |
| | SFTAGRAREYVTFLTVT | | |
| | PNLTSVYIANHRPLFTH | | |
| | LAVRIGGRYVVAGKMS | | |
| | ISPNTTYPSLLEDGRVE | | |
| | YRVALTEDRLPRLEEIRI | | |
| | WGPLQEDADIQVYRRY | | |
| | GEEYGNLTRPDITFTYF | | |
| | QPKPRQAWVWAAVRG | | |
| | PCSVSCGAGLRWVNYS | | |
| | CLDQARKELVETVQCQ | | |
| | GSQQPPAWPEACVLEP | | |
| | CPPYWAVGDFGPCSAS | | |
| | CGGGLRERPVRCVEAQ | | |
| | GSLLKTLPPARCRAGA | | |
| | QQPAVALETCNPQPCP | | |
| | ARWEVSEPSSCTSAGG | | |
| | AGLALENETCVPGADG | | |
| | LEAPVTEGPGSVDEKLP | | |
| | APEPCVGMSCPPGWGH | | |
| | LDATSAGEKAPSPWGSI | | |
| | RTGAQAAHVWTPAAG | | |
| | SCSVSCGRGLMELRFLC | | |
| | MDSALRVPVQEELCGL | | |
| | ASKPGSRREVCQAVPC | | |
| | PARWQYKLAACSVSCG | | |
| | RGVVRRILYCARAHGE | | |
| | DDGEEILLDTQCQGLPR | | |
| | PEPQEACSLEPCPPRWK | | |
| | VMSLGPCSASCGLGTA | | |
| | RRSVACVQLDQGQDVE | | |
| | VDEAACAALVRPEASV | | |
| | PCLIADCTYRWHVGTW | | |
| | MECSVSCGDGIQRRRD | | |
| | TCLGPQAQAPVPADFC | | |
| | QHLPKPVTVRGCWAGP | | |
| | CVGQGTPSLVPHEEAA | | |
| | APGRTTATPAGASLEW | | |
| | SQARGLLFSPAPQPRRL | | |
| | LPGPQENSVQSSACGR | | |
| | QHLEPTGTIDMRGPGQ | | |
| | ADCAVAIGRPLGEVVT | | |
| | LRVLESSLNCSAGDML | | |
| | LLWGRLTWRKMCRKL | | |
| | LDMTFSSKTNTLVVRQ | | |
| | RCGRPGGGVLLRYGSQ | | |
| | LAPETFYRECDMQLFG | | |
| | PWGEIVSPSLSPATSNA | | |
| | GGCRLFINVAPHARIAI | | |
| | HALATNMGAGTEGAN | | |
| | ASYILIRDTHSLRTTAFH | | |
| | GQQVLYWESESSQAEM | | |
| | EFSEGFLKAQASLRGQ | | |
| | YWTLQSWVPEMQDPQ | | |
| | SWKGKEGT | | |
| FOXP3 | MPNPRPGKPSAPSLALG PSPGASPSWRAAPKAS DLLGARGPGGTFQGRD LRGGAHASSSSLNPMPP SQLQLPTLPLVMVAPSG ARLGPLPHLQALLDR PHFMHQLSTVDAHART PVLQVHPLESPAMISLT PPTTATGVFSLKARPGL PPGINVASLEWVSREPA LLCTFPNPSAPRKDSTL SAVPQSSYPLLANGVC KWPGCEKVFEEPEDFL KHCQADHLLDEKGRA QCLLQREMVQSLEQQL VLEKEKLSAMQAHLAG | Im- mune cells | [chemical structure] |
| | KMALTKASSVASSDKG | | |
| | SCCIVAAGSQGPVVPA | | |
| | WSGPREAPDSLFAVRR | | |
| | HLWGSHGNSTFPEFLH | | |
| | NMDYFKFHNMRPPFTY | | |
| | ATLIRWAILEAPEKQRT | | |
| | LNEIYHWFTRMFAFFR | | |
| | NHPATWKNAIRHNLSL | | |
| | HKCFVRVESEKGAVWT | | |
| | VDELEFRKKRSQRPSRC | | |
| | SNPTPGP | | |
| IL-10 | SPGQGTQSENSCTHFPG NLPNMLRDLRDAFSRV KTFFQMKDQLDNLLLK ESLLEDFKGYLGCQALS EMIQFYLEEVMPQAEN QDPDIKAHVNSLGENL KTLRLRLRRCHRFLPCE NKSKAVEQVKNAFNKL QEKGIYKAMSEFDIFIN YIEAYMTMKIRN | Im- mune cells | [chemical structure] |
| IL-2 | APTSSSTKKTQLQLEHL LLDLQMILNGINNYKNP KLTRMLTFKFYMPKKA TELKHLQCLEEELKPLE EVLNLAQSKNFHLRPR DLISNINVIVLELKGSET TFMCEYADETATIVEFL NRWITFCQSIISTLT | Im- mune cells | [chemical structure] |

[0300] In some embodiments, the expression sequence encodes a therapeutic protein. In some embodiments, the expression sequence encodes a cytokine, e.g., IL-12p70, IL-15, IL-2, IL-18, IL-21, IFN-α, IFN-β, IL-10, TGF-beta, IL-4, or IL-35, or a functional fragment thereof. In some embodiments, the expression sequence encodes an immune checkpoint inhibitor. In some embodiments, the expression sequence encodes an agonist (e.g., a TNFR family member such as CD137L, OX40L, ICOSL, LIGHT, or CD70). In some embodiments, the expression sequence encodes a chimeric antigen receptor. In some embodiments, the expression sequence encodes an inhibitory receptor agonist (e.g., PDL1, PDL2, Galectin-9, VISTA, B7H4, or MHCII) or inhibitory receptor (e.g., PD1, CTLA4, TIGIT, LAGS, or TIM3). In some embodiments, the expression sequence encodes an inhibitory receptor antagonist. In some embodiments, the expression sequence encodes one or more TCR chains (alpha and beta chains or gamma and delta chains). In some embodiments, the expression sequence encodes a secreted T cell or immune cell engager (e.g., a bispecific antibody such as BiTE, targeting, e.g., CD3, CD137, or CD28 and a tumor-expressed protein e.g., CD19, CD20, or BCMA etc.). In some embodiments, the expression sequence encodes a transcription factor (e.g., FOXP3, HELIOS, TOX1, or TOX2). In some embodiments, the expression sequence encodes an immunosuppressive enzyme (e.g., IDO or CD39/CD73). In some embodiments, the expression sequence encodes a GvHD (e.g., anti-HLA-A2 CAR-Tregs).

[0301] In some embodiments, a polynucleotide encodes a protein that is made up of subunits that are encoded by more than one gene. For example, the protein may be a heterodimer, wherein each chain or subunit of the protein is encoded by a separate gene. It is possible that more than one circRNA molecule is delivered in the transfer vehicle and each circRNA encodes a separate subunit of the protein. Alternatively, a single circRNA may be engineered to encode more than one subunit. In certain embodiments, separate circRNA molecules encoding the individual subunits may be administered in separate transfer vehicles.

### 3.1 Cytokines

[0302] Descriptions and/or amino acid sequences of IL-2, IL-7, IL-10, IL-12, IL-15, IL-18, IL-27beta, IFNgamma, and/or TGFbeta1 are provided herein and at the www.uniprot.org database at accession numbers: P60568 (IL-2), P29459 (IL-12A), P29460 (IL-12B), P13232 (IL-7), P22301 (IL-10), P40933 (IL-15), Q14116 (IL-18), Q14213 (IL-27beta), P01579 (IFNgamma), and/or P01137 (TGFbeta1).

### 3.2 PD-1 and PD-L1 Antagonists

[0303] In some embodiments, a PD-1 inhibitor is pembrolizumab, pidilizumab, or nivolumab. In some embodiments, Nivolumab is described in WO2006/121168. In some embodiments, Pembrolizumab is described in WO2009/114335. In some embodiments, Pidilizumab is described in WO2009/101611. Additional anti-PD1 antibodies are described in U.S. Pat. No. 8,609,089, US 2010028330, US 20120114649, WO2010/027827 and WO2011/066342.

[0304] In some embodiments, a PD-L1 inhibitor is atezolizumab, avelumab, durvalumab, BMS-936559, or CK-301.

[0305] Descriptions and/or amino acid sequences of heavy and light chains of PD-1, and/or PD-L1 antibodies are provided herein and at the www.drugbank.ca database at accession numbers: DB09037 (Pembrolizumab), DB09035 (Nivolumab), DB15383 (Pidilizumab), DB11595 (Atezolizumab), DB11945 (Avelumab), and DB11714 (Durvalumab).

### 3.3 T Cell Receptors

[0306] TCRs are described using the International Immunogenetics (IMGT) TCR nomenclature, and links to the IMGT public database of TCR sequences. Native alpha-beta heterodimeric TCRs have an alpha chain and a beta chain. Broadly, each chain may comprise variable, joining and constant regions, and the beta chain also usually contains a short diversity region between the variable and joining regions, but this diversity region is often considered as part of the joining region. Each variable region may comprise three CDRs (Complementarity Determining Regions) embedded in a framework sequence, one being the hypervariable region named CDR3. There are several types of alpha chain variable (Vα) regions and several types of beta chain variable (Vβ) regions distinguished by their framework, CDR1 and CDR2 sequences, and by a partly defined CDR3 sequence. The Vα types are referred to in IMGT nomenclature by a unique TRAV number. Thus, “TRAV21” defines a TCR Vα region having unique framework and CDR1 and CDR2 sequences, and a CDR3 sequence which is partly defined by an amino acid sequence which is preserved from TCR to TCR but which also includes an amino acid sequence which varies from TCR to TCR. In the same way, “TRBV5-1” defines a TCR VP region having unique framework and CDR1 and CDR2 sequences, but with only a partly defined CDR3 sequence.

[0307] The joining regions of the TCR are similarly defined by the unique IMGT TRAJ and TRBJ nomenclature, and the constant regions by the IMGT TRAC and TRBC nomenclature.

[0308] The beta chain diversity region is referred to in IMGT nomenclature by the abbreviation TRBD, and, as mentioned, the concatenated TRBD/TRBJ regions are often considered together as the joining region.

[0309] The unique sequences defined by the IMGT nomenclature are widely known and accessible to those working in the TCR field. For example, they can be found in the IMGT public database. The “T cell Receptor Factsbook”, (2001) LeFranc and LeFranc, Academic Press, ISBN 0-12-441352-8 also discloses sequences defined by the IMGT nomenclature, but because of its publication date and consequent time-lag, the information therein sometimes needs to be confirmed by reference to the IMGT database.

[0310] Native TCRs exist in heterodimeric αβ or γδ forms. However, recombinant TCRs consisting of aa or ββ homodimers have previously been shown to bind to peptide MHC molecules. Therefore, the TCR of the invention may be a heterodimeric αβ TCR or may be an αα or ββ homodimeric TCR.

[0311] For use in adoptive therapy, an αβ heterodimeric TCR may, for example, be transfected as full length chains having both cytoplasmic and transmembrane domains. In certain embodiments TCRs of the invention may have an introduced disulfide bond between residues of the respective constant domains, as described, for example, in WO 2006/000830.

[0312] TCRs of the invention, particularly alpha-beta heterodimeric TCRs, may comprise an alpha chain TRAC constant domain sequence and/or a beta chain TRBC1 or TRBC2 constant domain sequence. The alpha and beta chain constant domain sequences may be modified by truncation or substitution to delete the native disulfide bond between Cys4 of exon 2 of TRAC and Cys2 of exon 2 of TRBC1 or TRBC2. The alpha and/or beta chain constant domain sequence(s) may also be modified by substitution of cysteine residues for Thr 48 of TRAC and Ser 57 of TRBC1 or TRBC2, the said cysteines forming a disulfide bond between the alpha and beta constant domains of the TCR.

[0313] Binding affinity (inversely proportional to the equilibrium constant K_{D}) and binding half-life (expressed as T½) can be determined by any appropriate method. It will be appreciated that doubling the affinity of a TCR results in halving the K_{D}. T½ is calculated as ln 2 divided by the off-rate (koff). So doubling of T½ results in a halving in koff. K_{D} and koff values for TCRs are usually measured for soluble forms of the TCR, i.e. those forms which are truncated to remove cytoplasmic and transmembrane domain residues. Therefore, it is to be understood that a given TCR has an improved binding affinity for, and/or a binding half-life for the parental TCR if a soluble form of that TCR has the said characteristics. Preferably the binding affinity or binding half-life of a given TCR is measured several times, for example 3 or more times, using the same assay protocol, and an average of the results is taken.

[0314] Since the TCRs of the invention have utility in adoptive therapy, the invention includes a non-naturally occurring and/or purified and/or engineered cell, especially a T-cell, presenting a TCR of the invention. There are a number of methods suitable for the transfection of T cells with nucleic acid (such as DNA, cDNA or RNA) encoding the TCRs of the invention (see for example Robbins et al., (2008) J Immunol. 180: 6116-6131). T cells expressing the TCRs of the invention will be suitable for use in adoptive therapy-based treatment of cancers such as those of the pancreas and liver. As will be known to those skilled in the art, there are a number of suitable methods by which adoptive therapy can be carried out (see for example Rosenberg et al., (2008) Nat Rev Cancer 8(4): 299-308).

[0315] As is well-known in the art, TCRs of the invention may be subject to post-translational modifications when expressed by transfected cells. Glycosylation is one such modification, which may comprise the covalent attachment of oligosaccharide moieties to defined amino acids in the TCR chain. For example, asparagine residues, or serine/threonine residues are well-known locations for oligosaccharide attachment. The glycosylation status of a particular protein depends on a number of factors, including protein sequence, protein conformation and the availability of certain enzymes. Furthermore, glycosylation status (i.e. oligosaccharide type, covalent linkage and total number of attachments) can influence protein function. Therefore, when producing recombinant proteins, controlling glycosylation is often desirable. Glycosylation of transfected TCRs may be controlled by mutations of the transfected gene (Kuball J et al. (2009), J Exp Med 206(2):463-475). Such mutations are also encompassed in this invention.

[0316] A TCR may be specific for an antigen in the group MAGE-A1, MAGE-A2, MAGE-A3, MAGE-A4, MAGE-A5, MAGE-A6, MAGE-A7, MAGE-A8, MAGE-A9, MAGE-A10, MAGE-A11, MAGE-A12, MAGE-A13, GAGE-1, GAGE-2, GAGE-3, GAGE-4, GAGE-5, GAGE-6, GAGE-7, GAGE-8, BAGE-1, RAGE-1, LB33/MUM-1, PRAME, NAG, MAGE-Xp2 (MAGE-B2), MAGE-Xp3 (MAGE-B3), MAGE-Xp4 (AGE-B4), tyrosinase, brain glycogen phosphorylase, Melan-A, MAGE-C1, MAGE-C2, NY-ES0-1, LAGE-1, SSX-1, SSX-2(HOM-MEL-40), SSX-1, SSX-4, SSX-5, SCP-1, CT-7, alpha-actinin-4, Bcr-Abl fusion protein, Casp-8, beta-catenin, cdc27, cdk4, cdkn2a, coa-1, dek-can fusion protein, EF2, ETV6-AML1 fusion protein, LDLR-fucosyltransferaseAS fusion protein, HLA-A2, HLA-A11, hsp70-2, KIAA0205, Mart2, Mum-2, and 3, neo-PAP, myosin class I, OS-9, pml-RARa fusion protein, PTPRK, K-ras, N-ras, Triosephosphate isomeras, GnTV, Herv-K-mel, Lage-1, Mage-C2, NA-88, Lage-2, SP17, and TRP2-Int2, (MART-I), gp100 (Pmel 17), TRP-1, TRP-2, MAGE-1, MAGE-3, p15(58), CEA, NY-ESO (LAGE), SCP-1, Hom/Mel-40, p53, H-Ras, HER-2/neu, BCR-ABL, E2A-PRL, H4-RET, IGH-IGK, MYL-RAR, Epstein Barr virus antigens, EBNA, human papillomavirus (HPV) antigens E6 and E7, TSP-180, MAGE-4, MAGE-5, MAGE-6, p185erbB2, p180erbB-3, c-met, nm-23H1, PSA, TAG-72-4, CA 19-9, CA 72-4, CAM 17.1, NuMa, K-ras, .beta.-Catenin, CDK4, Mum-1, p16, TAGE, PS MA, PSCA, CT7, telomerase, 43-9F, 5T4, 791Tgp72, α-fetoprotein (AFP), 13HCG, BCA225, BTAA, CA 125, CA 15-3 (CA 27.29\BCAA), CA 195, CA 242, CA-50, CAM43, CD68\KP1, CO-029, FGF-5, G250, Ga733 (EpCAM), HTgp-175, M344, MA-50, MG7-Ag, MOV18,NB\170K, NY-CO-1, RCAS1, SDCCAG16, TA-90 (Mac-2 binding protein\cyclophilin C-associated protein), TAAL6, TAG72, TLP, and TPS.

### 3.4 Transcription Factors

[0317] Regulatory T cells (Treg) are important in maintaining homeostasis, controlling the magnitude and duration of the inflammatory response, and in preventing autoimmune and allergic responses.

[0318] In general, Tregs are thought to be mainly involved in suppressing immune responses, functioning in part as a “self-check” for the immune system to prevent excessive reactions. In particular, Tregs are involved in maintaining tolerance to self-antigens, harmless agents such as pollen or food, and abrogating autoimmune disease.

[0319] Tregs are found throughout the body including, without limitation, the gut, skin, lung, and liver. Additionally, Treg cells may also be found in certain compartments of the body that are not directly exposed to the external environment such as the spleen, lymph nodes, and even adipose tissue. Each of these Treg cell populations is known or suspected to have one or more unique features and additional information may be found in Lehtimaki and Lahesmaa, Regulatory T cells control immune responses through their non-redundant tissue specific features, 2013, FRONTIERS IN IMMUNOL., 4(294): 1-10, the disclosure of which is hereby incorporated in its entirety.

[0320] Typically, Tregs are known to require TGF-β and IL-2 for proper activation and development. Tregs, expressing abundant amounts of the IL-2 receptor (IL-2R), are reliant on IL-2 produced by activated T cells. Tregs are known to produce both IL-10 and TGF-β, both potent immunosuppressive cytokines. Additionally, Tregs are known to inhibit the ability of antigen presenting cells (APCs) to stimulate T cells. One proposed mechanism for APC inhibition is via CTLA-4, which is expressed by Foxp3+Treg. It is thought that CTLA-4 may bind to B7 molecules on APCs and either block these molecules or remove them by causing internalization resulting in reduced availability of B7 and an inability to provide adequate co-stimulation for immune responses. Additional discussion regarding the origin, differentiation and function of Treg may be found in Dhamne et al., Peripheral and thymic Foxp3+ regulatory T cells in search of origin, distinction, and function, 2013, Frontiers in Immunol., 4 (253): 1-11, the disclosure of which is hereby incorporated in its entirety.

[0321] Descriptions and/or amino acid sequences of FOXP3, STAT5B, and/or HELIOS are provided herein and at the www.uniprot.org database at accession numbers: Q9BZS1 (FOXP3), P51692 (STAT5b), and/or Q9UKS7 (HELIOS).

### Foxp3

[0322] In some embodiments, a transcription factor is the Forkhead box P3 transcription factor (Foxp3). Foxp3 has been shown to be a key regulator in the differentiation and activity of Treg. In fact, loss-of-function mutations in the Foxp3 gene have been shown to lead to the lethal IPEX syndrome (immune dysregulation, polyendocrinopathy, enteropathy, X-linked). Patients with IPEX suffer from severe autoimmune responses, persistent eczema, and colitis. Regulatory T (Treg) cells expressing Foxp3 play a key role in limiting inflammatory responses in the intestine (Josefowicz, S. Z. et al. Nature, 2012, 482, 395-U1510).

### STAT

[0323] Members of the signal transducer and activator of transcription (STAT) protein family are intracellular transcription factors that mediate many aspects of cellular immunity, proliferation, apoptosis and differentiation. They are primarily activated by membrane receptor-associated Janus kinases (JAK). Dysregulation of this pathway is frequently observed in primary tumors and leads to increased angiogenesis, enhanced survival of tumors and immunosuppression. Gene knockout studies have provided evidence that STAT proteins are involved in the development and function of the immune system and play a role in maintaining immune tolerance and tumor surveillance.

[0324] There are seven mammalian STAT family members that have been identified: STAT1, STAT2, STAT5, STAT4, STAT5 (including STAT5A and STAT5B), and STATE.

[0325] Extracellular binding of cytokines or growth factors induce activation of receptor-associated Janus kinases, which phosphorylate a specific tyrosine residue within the STAT protein promoting dimerization via their SH2 domains. The phosphorylated dimer is then actively transported to the nucleus via an importin α/β ternary complex. Originally, STAT proteins were described as latent cytoplasmic transcription factors as phosphorylation was thought to be required for nuclear retention. However, unphosphorylated STAT proteins also shuttle between the cytosol and nucleus, and play a role in gene expression. Once STAT reaches the nucleus, it binds to a consensus DNA-recognition motif called gamma-activated sites (GAS) in the promoter region of cytokine-inducible genes and activates transcription. The STAT protein can be dephosphorylated by nuclear phosphatases, which leads to inactivation of STAT and subsequent transport out of the nucleus by a exportin-RanGTP complex.

[0326] In some embodiments, a STAT protein of the present disclosure may be a STAT protein that comprises a modification that modulates its expression level or activity. In some embodiments such modifications include, among other things, mutations that effect STAT dimerization, STAT protein binding to signaling partners, STAT protein localization or STAT protein degradation. In some embodiments, a STAT protein of the present disclosure is constitutively active. In some embodiments, a STAT protein of the present disclosure is constitutively active due to constitutive dimerization. In some embodiments, a STAT protein of the present disclosure is constitutively active due to constitutive phosphorylation as described in Onishi, M. et al., Mol. Cell. Biol. July 1998 vol. 18 no. 7 3871-3879 the entirety of which is herein incorporated by reference.

### 3.5 Chimeric Antigen Receptors

[0327] Chimeric antigen receptors (CARs or CAR-Ts) are genetically-engineered receptors. These engineered receptors may be inserted into and expressed by immune cells, including T cells via circular RNA as described herein. With a CAR, a single receptor may be programmed to both recognize a specific antigen and, when bound to that antigen, activate the immune cell to attack and destroy the cell bearing that antigen. When these antigens exist on tumor cells, an immune cell that expresses the CAR may target and kill the tumor cell. In some embodiments, the CAR encoded by the polynucleotide comprises (i) an antigen-binding molecule that specifically binds to a target antigen, (ii) a hinge domain, a transmembrane domain, and an intracellular domain, and (iii) an activating domain.

[0328] In some embodiments, an orientation of the CARs in accordance with the disclosure comprises an antigen binding domain (such as an scFv) in tandem with a costimulatory domain and an activating domain. The costimulatory domain may comprise one or more of an extracellular portion, a transmembrane portion, and an intracellular portion. In other embodiments, multiple costimulatory domains may be utilized in tandem.

### Antigen Binding Domain

[0329] CARs may be engineered to bind to an antigen (such as a cell-surface antigen) by incorporating an antigen binding molecule that interacts with that targeted antigen. In some embodiments, the antigen binding molecule is an antibody fragment thereof, e.g., one or more single chain antibody fragment (scFv). An scFv is a single chain antibody fragment having the variable regions of the heavy and light chains of an antibody linked together. See U.S. Pat. Nos. 7,741,465, and 6,319,494 as well as Eshhar et al., Cancer Immunol Immunotherapy (1997) 45: 131-136. An scFv retains the parent antibody's ability to specifically interact with target antigen. scFvs are useful in chimeric antigen receptors because they may be engineered to be expressed as part of a single chain along with the other CAR components. Id. See also Krause et al., J. Exp. Med., Volume 188, No. 4, 1998 (619-626); Finney et al., Journal of Immunology, 1998, 161: 2791-2797. It will be appreciated that the antigen binding molecule is typically contained within the extracellular portion of the CAR such that it is capable of recognizing and binding to the antigen of interest. Bispecific and multispecific CARs are contemplated within the scope of the invention, with specificity to more than one target of interest.

[0330] In some embodiments, the antigen binding molecule comprises a single chain, wherein the heavy chain variable region and the light chain variable region are connected by a linker. In some embodiments, the VH is located at the N terminus of the linker and the VL is located at the C terminus of the linker. In other embodiments, the VL is located at the N terminus of the linker and the VH is located at the C terminus of the linker. In some embodiments, the linker comprises at least about 5, at least about 8, at least about 10, at least about 13, at least about 15, at least about 18, at least about 20, at least about 25, at least about 30, at least about 35, at least about 40, at least about 45, at least about 50, at least about 60, at least about 70, at least about 80, at least about 90, or at least about 100 amino acids.

[0331] In some embodiments, the antigen binding molecule comprises a nanobody. In some embodiments, the antigen binding molecule comprises a DARPin. In some embodiments, the antigen binding molecule comprises an anticalin or other synthetic protein capable of specific binding to target protein.

[0332] In some embodiments, the CAR comprises an antigen binding domain specific for an antigen selected from the group CD19, CD123, CD22, CD30, CD171, CS-1, C-type lectin-like molecule-1, CD33, epidermal growth factor receptor variant III (EGFRvIII), ganglioside G2 (GD2), ganglioside GD3, TNF receptor family member B cell maturation (BCMA), Tn antigen ((Tn Ag) or (GaINAca-Ser/Thr)), prostate-specific membrane antigen (PSMA), Receptor tyrosine kinase-like orphan receptor 1 (ROR1), Fms-Like Tyrosine Kinase 3 (FLT3), Tumor-associated glycoprotein 72 (TAG72), CD38, CD44v6, Carcinoembryonic antigen (CEA), Epithelial cell adhesion molecule (EPCAM), B7H3 (CD276), KIT (CD117), Interleukin-13 receptor subunit alpha-2, mesothelin, Interleukin 11 receptor alpha (IL-11Ra), prostate stem cell antigen (PSCA), Protease Serine 21, vascular endothelial growth factor receptor 2 (VEGFR2), Lewis(Y) antigen, CD24, Platelet-derived growth factor receptor beta (PDGFR-beta), Stage-specific embryonic antigen-4 (SSEA-4), CD20, Folate receptor alpha, HER2, HERS, Mucin 1, cell surface associated (MUC1), epidermal growth factor receptor (EGFR), neural cell adhesion molecule (NCAM), Prostase, prostatic acid phosphatase (PAP), elongation factor 2 mutated (ELF2M), Ephrin B2, fibroblast activation protein alpha (FAP), insulin-like growth factor 1 receptor (IGF-I receptor), carbonic anhydrase IX (CAIX), Proteasome (Prosome, Macropain) Subunit, Beta Type, 9 (LMP2), glycoprotein 100 (gp100), oncogene fusion protein consisting of breakpoint cluster region (BCR) and Abelson murine leukemia viral oncogene homolog 1 (Abl) (bcr-abl), tyrosinase, ephrin type-A receptor 2 (EphA2), Fucosyl GM1, sialyl Lewis adhesion molecule (sLe), ganglioside GM3, transglutaminase 5 (TGS5), high molecular weight-melanoma-associated antigen (HMWMAA), o-acetyl-GD2 ganglioside (OAcGD2), Folate receptor beta, tumor endothelial marker 1 (TEM1/CD248), tumor endothelial marker 7-related (TEM7R), claudin 6 (CLDN6), thyroid stimulating hormone receptor (TSHR), G protein-coupled receptor class C group 5, member D (GPRCSD), chromosome X open reading frame 61 (CXORF61), CD97, CD179a, anaplastic lymphoma kinase (ALK), Polysialic acid, placenta-specific 1 (PLAC1), hexasaccharide portion of globoH glycoceramide (GloboH), mammary gland differentiation antigen (NY-BR-1), uroplakin 2 (UPK2), Hepatitis A virus cellular receptor 1 (HAVCR1), adrenoceptor beta 3 (ADRB3), pannexin 3 (PANX3), G protein-coupled receptor 20 (GPR20), lymphocyte antigen 6 complex, locus K 9 (LY6K), Olfactory receptor 51E2 (OR51E2), TCR Gamma Alternate Reading Frame Protein (TARP), Wilms tumor protein (WT1), Cancer/testis antigen 1 (NY-ESO-1), Cancer/testis antigen 2 (LAGE-1a), MAGE family members (including MAGE-A1, MAGE-A3 and MAGE-A4), ETS translocation-variant gene 6, located on chromosome 12p (ETV6-AML), sperm protein 17 (SPA17), X Antigen Family, Member 1A (XAGE1), angiopoietin-binding cell surface receptor 2 (Tie 2), melanoma cancer testis antigen-1 (MAD-CT-1), melanoma cancer testis antigen-2 (MAD-CT-2), Fos-related antigen 1, tumor protein p53 (p53), p53 mutant, prostein, surviving, telomerase, prostate carcinoma tumor antigen-1, melanoma antigen recognized by T cells 1, Rat sarcoma (Ras) mutant, human Telomerase reverse transcriptase (hTERT), sarcoma translocation breakpoints, melanoma inhibitor of apoptosis (ML-IAP), ERG (transmembrane protease, serine 2 (TMPRSS2) ETS fusion gene), N-Acetyl glucosaminyl-transferase V (NA17), paired box protein Pax-3 (PAX3), Androgen receptor, Cyclin B1, v-myc avian myelocytomatosis viral oncogene neuroblastoma derived homolog (MYCN), Ras Homolog Family Member C (RhoC), Tyrosinase-related protein 2 (TRP-2), Cytochrome P450 1B1 (CYP1B1), CCCTC-Binding Factor (Zinc Finger Protein)-Like, Squamous Cell Carcinoma Antigen Recognized By T Cells 3 (SART3), Paired box protein Pax-5 (PAX5), proacrosin binding protein sp32 (OY-TES1), lymphocyte-specific protein tyrosine kinase (LCK), A kinase anchor protein 4 (AKAP-4), synovial sarcoma, X breakpoint 2 (SSX2), Receptor for Advanced Glycation Endproducts (RAGE-1), renal ubiquitous 1 (RU1), renal ubiquitous 2 (RU2), legumain, human papilloma virus E6 (HPV E6), human papilloma virus E7 (HPV E7), intestinal carboxyl esterase, heat shock protein 70-2 mutated (mut hsp70-2), CD79a, CD79b, CD72, Leukocyte-associated immunoglobulin-like receptor 1 (LAIR1), Fc fragment of IgA receptor (FCAR or CD89), Leukocyte immunoglobulin-like receptor subfamily A member 2 (LILRA2), CD300 molecule-like family member f (CD300LF), C-type lectin domain family 12 member A (CLEC12A), bone marrow stromal cell antigen 2 (BST2), EGF-like module-containing mucin-like hormone receptor-like 2 (EMR2), lymphocyte antigen 75 (LY75), Glypican-3 (GPC3), Fc receptor-like 5 (FCRLS), MUC16, 5T4, 8H9, αvβθ integrin, αvβδ integrin, alphafetoprotein (AFP), B7-H6, ca-125, CA9, CD44, CD44v7/8, CD52, E-cadherin, EMA (epithelial membrane antigen), epithelial glycoprotein-2 (EGP-2), epithelial glycoprotein-40 (EGP-40), ErbB4, epithelial tumor antigen (ETA), folate binding protein (FBP), kinase insert domain receptor (KDR), k-light chain, L1 cell adhesion molecule, MUC18,NKG2D, oncofetal antigen (h5T4), tumor/testis-antigen 1B, GAGE, GAGE-1, BAGE, SCP-1, CTZ9, SAGE, CAGE, CT10, MART-1, immunoglobulin lambda-like polypeptide 1 (IGLL1), Hepatitis B Surface Antigen Binding Protein (HBsAg), viral capsid antigen (VCA), early antigen (EA), EBV nuclear antigen (EBNA), HHV-6p41 early antigen, HHV-6B U94 latent antigen, HHV-6B p98 late antigen, cytomegalovirus (CMV) antigen, large T antigen, small T antigen, adenovirus antigen, respiratory syncytial virus (RSV) antigen, haemagglutinin (HA), neuraminidase (NA), parainfluenza type 1 antigen, parainfluenza type 2 antigen, parainfluenza type 3 antigen, parainfluenza type 4 antigen, Human Metapneumovirus (HMPV) antigen, hepatitis C virus (HCV) core antigen, HIV p24 antigen, human T-cell lympotrophic virus (HTLV-1) antigen, Merkel cell polyoma virus small T antigen, Merkel cell polyoma virus large T antigen, Kaposi sarcoma-associated herpesvirus (KSHV) lytic nuclear antigen and KSHV latent nuclear antigen. In some embodiments, an antigen binding domain comprises SEQ ID NO: 321 and/or 322.

### Hinge/Spacer Domain

[0333] In some embodiments, a CAR of the instant disclosure comprises a hinge or spacer domain. In some embodiments, the hinge/spacer domain may comprise a truncated hinge/spacer domain (THD) the THD domain is a truncated version of a complete hinge/spacer domain (“CHD”). In some embodiments, an extracellular domain is from or derived from (e.g., comprises all or a fragment of) ErbB2, glycophorin A (GpA), CD2, CD3 delta, CD3 epsilon, CD3 gamma, CD4, CD7, CD8a, CD8[T CD11a (IT GAL), CD11b (IT GAM), CD11c (ITGAX), CD11d (IT GAD), CD18 (ITGB2), CD19 (B4), CD27 (TNFRSF7), CD28, CD28T, CD29 (ITGB1), CD30 (TNFRSF8), CD40 (TNFRSF5), CD48 (SLAMF2), CD49a (ITGA1), CD49d (ITGA4), CD49f (ITGA6), CD66a (CEACAM1), CD66b (CEACAM8), CD66c (CEACAM6), CD66d (CEACAM3), CD66e (CEACAM5), CD69 (CLEC2), CD79A (B-cell antigen receptor complex-associated alpha chain), CD79B (B-cell antigen receptor complex-associated beta chain), CD84 (SLAMF5), CD96 (Tactile), CD100 (SEMA4D), CD103 (ITGAE), CD134 (0×40), CD137 (4-1BB), CD150 (SLAMF1), CD158A (KIR2DL1), CD158B1 (KIR2DL2), CD158B2 (KIR2DL3), CD158C (KIR3DP1), CD158D (KIRDL4), CD158F1 (KIR2DL5A), CD158F2 (KIR2DL5B), CD158K (KIR3DL2), CD160 (BY55), CD162 (SELPLG), CD226 (DNAM1), CD229 (SLAMF3), CD244 (SLAMF4), CD247 (CD3-zeta), CD258 (LIGHT), CD268 (BAFFR), CD270 (TNFSF14), CD272 (BTLA), CD276 (B7-H3), CD279 (PD-1), CD314 (NKG2D), CD319 (SLAMF7), CD335 (NK-p46), CD336 (NK-p44), CD337 (NK-p30), CD352 (SLAMF6), CD353 (SLAMF8), CD355 (CRT AM), CD357 (TNFRSF18), inducible T cell co-stimulator (ICOS), LFA-1 (CD11a/CD18), NKG2C, DAP-10, ICAM-1, NKp80 (KLRF1), IL-2R beta, IL-2R gamma, IL-7R alpha, LFA-1, SLAMF9, LAT, GADS (GrpL), SLP-76 (LCP2), PAG1/CBP, a CD83 ligand, Fc gamma receptor, MHC class 1 molecule, MHC class 2 molecule, a TNF receptor protein, an immunoglobulin protein, a cytokine receptor, an integrin, activating NK cell receptors, a Toll ligand receptor, and fragments or combinations thereof. A hinge or spacer domain may be derived either from a natural or from a synthetic source.

[0334] In some embodiments, a hinge or spacer domain is positioned between an antigen binding molecule (e.g., an scFv) and a transmembrane domain. In this orientation, the hinge/spacer domain provides distance between the antigen binding molecule and the surface of a cell membrane on which the CAR is expressed. In some embodiments, a hinge or spacer domain is from or derived from an immunoglobulin. In some embodiments, a hinge or spacer domain is selected from the hinge/spacer regions of IgG1, IgG2, IgG3, IgG4, IgA, IgD, IgE, IgM, or a fragment thereof. In some embodiments, a hinge or spacer domain comprises, is from, or is derived from the hinge/spacer region of CD8 alpha. In some embodiments, a hinge or spacer domain comprises, is from, or is derived from the hinge/spacer region of CD28. In some embodiments, a hinge or spacer domain comprises a fragment of the hinge/spacer region of CD8 alpha or a fragment of the hinge/spacer region of CD28, wherein the fragment is anything less than the whole hinge/spacer region. In some embodiments, the fragment of the CD8 alpha hinge/spacer region or the fragment of the CD28 hinge/spacer region comprises an amino acid sequence that excludes at least 1, at least 2, at least 3, at least 4, at least 5, at least 6, at least 7, at least 8, at least 9, at least 10, at least 11, at least 12, at least 13, at least 14, at least 15, at least 16, at least 17, at least 18, at least 19, or at least 20 amino acids at the N-terminus or C-Terminus, or both, of the CD8 alpha hinge/spacer region, or of the CD28 hinge/spacer region.

### Transmembrane Domain

[0335] The CAR of the present disclosure may further comprise a transmembrane domain and/or an intracellular signaling domain. The transmembrane domain may be designed to be fused to the extracellular domain of the CAR. It may similarly be fused to the intracellular domain of the CAR. In some embodiments, the transmembrane domain that naturally is associated with one of the domains in a CAR is used. In some instances, the transmembrane domain may be selected or modified (e.g., by an amino acid substitution) to avoid binding of such domains to the transmembrane domains of the same or different surface membrane proteins to minimize interactions with other members of the receptor complex. The transmembrane domain may be derived either from a natural or from a synthetic source. Where the source is natural, the domain may be derived from any membrane-bound or transmembrane protein.

[0336] Transmembrane regions may be derived from (i.e. comprise) a receptor tyrosine kinase (e.g., ErbB2), glycophorin A (GpA), 4-1BB/CD137, activating NK cell receptors, an immunoglobulin protein, B7-H3, BAFFR, BFAME (SEAMF8), BTEA, CD100 (SEMA4D), CD103, CD160 (BY55), CD18, CD19, CD19a, CD2, CD247, CD27, CD276 (B7-H3), CD28, CD29, CD3 delta, CD3 epsilon, CD3 gamma, CD30, CD4, CD40, CD49a, CD49D, CD49f, CD69, CD7, CD84, CD8alpha, CD8beta, CD96 (Tactile), CD11a, CD11b, CD11c, CD1 Id, CDS, CEACAM1, CRT AM, cytokine receptor, DAP-10, DNAM1 (CD226), Fc gamma receptor, GADS, GITR, HVEM (EIGHTR), IA4, ICAM-1, ICAM-1, Ig alpha (CD79a), IE-2R beta, IE-2R gamma, IE-7R alpha, inducible T cell costimulator (ICOS), integrins, ITGA4, ITGA4, ITGA6, IT GAD, ITGAE, ITGAE, IT GAM, ITGAX, ITGB2, ITGB7, ITGB1, KIRDS2, EAT, LFA-1, LFA-1, a ligand that specifically binds with CD83, LIGHT, LIGHT, LTBR, Ly9 (CD229), lymphocyte function-associated antigen-1 (LFA-1; CD1-1a/CD18), MHC class 1 molecule, NKG2C, NKG2D, NKp30, NKp44, NKp46, NKp80 (KLRF1), OX-40, PAG/Cbp, programmed death-1 (PD-1), PSGL1, SELPLG (CD 162), Signaling Lymphocytic Activation Molecules (SLAM proteins), SLAM (SLAMF1; CD150; IPO-3), SLAMF4 (CD244; 2B4), SLAMF6 (NTB-A; Ly108), SLAMF7, SLP-76, TNF receptor proteins, TNFR2, TNFSF14, a Toll ligand receptor, TRANCE/RANKL, VLA1, or VLA-6, or a fragment, truncation, or a combination thereof.

[0337] In some embodiments, suitable intracellular signaling domain include, but are not limited to, activating Macrophage/Myeloid cell receptors CSFR1, MYD88, CD14, TIE2, TLR4, CR3, CD64, TREM2, DAP10, DAP12, CD169, DECTIN1, CD206, CD47, CD163, CD36, MARCO, TIM4, MERTK, F4/80, CD91, C1QR, LOX-1, CD68, SRA, BAI-1, ABCA7, CD36, CD31, Lactoferrin, or a fragment, truncation, or combination thereof.

[0338] In some embodiments, a receptor tyrosine kinase may be derived from (e.g., comprise) Insulin receptor (InsR), Insulin-like growth factor I receptor (IGF1R), Insulin receptor-related receptor (IRR), platelet derived growth factor receptor alpha (PDGFRa), platelet derived growth factor receptor beta (PDGFRfi). KIT proto-oncogene receptor tyrosine kinase (Kit), colony stimulating factor 1 receptor (CSFR), fms related tyrosine kinase 3 (FLT3), fms related tyrosine kinase 1 (VEGFR-1), kinase insert domain receptor (VEGFR-2), fms related tyrosine kinase 4 (VEGFR-3), fibroblast growth factor receptor 1 (FGFR1), fibroblast growth factor receptor 2 (FGFR2), fibroblast growth factor receptor 3 (FGFR3), fibroblast growth factor receptor 4 (FGFR4), protein tyrosine kinase 7 (CCK4), neurotrophic receptor tyrosine kinase 1 (trkA), neurotrophic receptor tyrosine kinase 2 (trkB), neurotrophic receptor tyrosine kinase 3 (trkC), receptor tyrosine kinase like orphan receptor 1 (ROR1), receptor tyrosine kinase like orphan receptor 2 (ROR2), muscle associated receptor tyrosine kinase (MuSK), MET proto-oncogene, receptor tyrosine kinase (MET), macrophage stimulating 1 receptor (Ron), AXL receptor tyrosine kinase (Axl), TYRO3 protein tyrosine kinase (Tyro3), MER proto-oncogene, tyrosine kinase (Mer), tyrosine kinase with immunoglobulin like and EGF like domains 1 (TIE1), TEK receptor tyrosine kinase (TIE2), EPH receptor A 1 (EphA1), EPH receptor A2 (EphA2), (EPH receptor A3) EphA3, EPH receptor A4 (EphA4), EPH receptor A5 (EphA5), EPH receptor A6 (EphA6), EPH receptor A7 (EphA7), EPH receptor A8 (EphA8), EPH receptor A10 (EphA10), EPH receptor B1 (EphB1), EPH receptor B2 (EphB2), EPH receptor B3 (EphB3), EPH receptor B4 (EphB4), EPH receptor B6 (EphB6), ret proto oncogene (Ret), receptor-like tyrosine kinase (RYK), discoidin domain receptor tyrosine kinase 1 (DDR1), discoidin domain receptor tyrosine kinase 2 (DDR2), c-ros oncogene 1, receptor tyrosine kinase (ROS), apoptosis associated tyrosine kinase (Lmr1), lemur tyrosine kinase 2 (Lmr2), lemur tyrosine kinase 3 (Lmr3), leukocyte receptor tyrosine kinase (LTK), ALK receptor tyrosine kinase (ALK), or serine/threonine/tyrosine kinase 1 (STYK1).

### Costimulatory Domain

[0339] In certain embodiments, the CAR comprises a costimulatory domain. In some embodiments, the costimulatory domain comprises 4-1BB (CD137), CD28, or both, and/or an intracellular T cell signaling domain. In a preferred embodiment, the costimulatory domain is human CD28, human 4-1BB, or both, and the intracellular T cell signaling domain is human CD3 zeta (O. 4-1BB, CD28, CD3 zeta may comprise less than the whole 4-1BB, CD28 or CD3 zeta, respectively. Chimeric antigen receptors may incorporate costimulatory (signaling) domains to increase their potency. See U.S. Pat. Nos. 7,741,465, and 6,319,494, as well as Krause et al. and Finney et al. (supra), Song et al., Blood 119:696-706 (2012); Kalos et al., Sci Transl. Med. 3:95 (2011); Porter et al., N. Engl. J. Med. 365:725-33 (2011), and Gross et al., Amur. Rev. Pharmacol. Toxicol. 56:59-83 (2016).

[0340] In some embodiments, a costimulatory domain comprises the amino acid sequence of SEQ ID NO: 318 or 320.

### Intracellular Signaling Domain

[0341] The intracellular (signaling) domain of the engineered T cells disclosed herein may provide signaling to an activating domain, which then activates at least one of the normal effector functions of the immune cell. Effector function of a T cell, for example, may be cytolytic activity or helper activity including the secretion of cytokines.

[0342] In some embodiments, suitable intracellular signaling domain include (e.g., comprise), but are not limited to 4-1BB/CD137, activating NK cell receptors, an Immunoglobulin protein, B7-H3, BAFFR, BLAME (SLAMF8), BTLA, CD 100 (SEMA4D), CD103, CD160 (BY55), CD18, CD19, CD 19a, CD2, CD247, CD27, CD276 (B7-H3), CD28, CD29, CD3 delta, CD3 epsilon, CD3 gamma, CD30, CD4, CD40, CD49a, CD49D, CD49f, CD69, CD7, CD84, CD8alpha, CD8beta, CD96 (Tactile), CD11a, CD11b, CD11c, CD 11d, CDS, CEACAM1, CRT AM, cytokine receptor, DAP-10, DNAM1 (CD226), Fc gamma receptor, GADS, GITR, HVEM (LIGHTR), IA4, ICAM-1, Ig alpha (CD79a), IL-2R beta, IL-2R gamma, IL-7R alpha, inducible T cell costimulator (ICOS), integrins, ITGA4, ITGA6, ITGAD, ITGAE, ITGAL, ITGAM, ITGAX, ITGB2, ITGB7, ITGB1, KIRDS2, LAT, LFA-1, ligand that specifically binds with CD83, LIGHT, LTBR, Ly9 (CD229), Ly108, lymphocyte function-associated antigen-1 (LFA-1; CD1-1a/CD18), MHC class 1 molecule, NKG2C, NKG2D, NKp30, NKp44, NKp46, NKp80 (KLRF1), OX-40, PAG/Cbp, programmed death-1 (PD-1), PSGL1, SELPLG (CD162), Signaling Lymphocytic Activation Molecules (SLAM proteins), SLAM (SLAMF1; CD150; IPO-3), SLAMF4 (CD244; 2B4), SLAMF6 (NTB-A), SLAMF7, SLP-76, TNF receptor proteins, TNFR2, TNFSF14, a Toll ligand receptor, TRANCE/RANKL, VLA1, or VLA-6, or a fragment, truncation, or a combination thereof.

[0343] CD3 is an element of the T cell receptor on native T cells, and has been shown to be an important intracellular activating element in CARs. In some embodiments, the CD3 is CD3 zeta. In some embodiments, the activating domain comprises an amino acid sequence at least about 60%, at least about 65%, at least about 70%, at least about 75%, at least about 80%, at least about 85%, at least about 90%, at least about 95%, at least about 96%, at least about 97%, at least about 98%, at least about 99%, or about 100% identical to the polypeptide sequence of SEQ ID NO: 319.

### 3.6 Trispecific Antigen-Binding Proteins and Bispecific Antigen-Binding Proteins

[0344] Disclosed herein are circular RNA polypeptides encoding trispecific antigen-binding proteins (TRITEs), bispecific antigen-binding proteins (BITEs), functional fragments thereof, and pharmaceutical compositions thereof. Recombinant expression vectors useful for making circular RNA encoding trispecific antigen-binding proteins or bispecific antigen binding proteins, and cells comprising the inventive circular RNA are also provided herein. Also provided are methods of using the disclosed trispecific antigen-binding proteins or the bispecific antigen-binding proteins in the prevention and/or treatment of liver diseases, conditions and disorders. The trispecific antigen-binding proteins are capable of specifically binding to a target antigen, e.g., a cancer antigen, as well as CD3, TCR, CD16A, or NKp46, and a liver retention domain or a half-life extension domain, such as a domain binding human serum albumin (HSA). In some embodiments, the TRITE or BITE is created within a patient's liver post-administration of a composition comprising the inventive circular RNA polypeptides to a patient in need thereof.

[0345] In one aspect, trispecific antigen-binding proteins comprise a domain (A) which specifically binds to CD3, TCR, CD16A, or NKp46, a domain (B) which specifically binds to a half-life extension molecule or a liver retention molecule, and a domain (C) which specifically binds to a target antigen, e.g., a cancer cell antigen. The three domains in trispecific antigen-binding proteins may be arranged in any order. Thus, it is contemplated that the domain order of the trispecific antigen-binding proteins are in any of the following orders: (A)-(B)-(C), (A)-(C)-(B), (B)-(A)-(C), (B)-(C)-(A), (C)-(B)-(A), or (C)-(A)-(B).

[0346] In some embodiments, the trispecific antigen-binding proteins have a domain order of (A)-(B)-(C). In some embodiments, the trispecific antigen-binding proteins have a domain order of (A)-(C)-(B). In some embodiments, the trispecific antigen binding proteins have a domain order of (B)-(A)-(C). In some embodiments, the trispecific antigen-binding proteins have a domain order of (B)-(C)-(A). In some embodiments, the trispecific antigen-binding proteins have a domain order of (C)-(B)-(A). In some embodiments, the trispecific antigen-binding proteins have a domain order of (C)-(A)-(B).

[0347] In an embodiment, a bispecific antigen-binding protein comprises a domain (A) which specifically binds to CD3, TCR, CD16A, or NKp46, and a domain (B) which specifically binds to a target antigen. The two domains in a bispecific antigen-binding protein are arranged in any order. Thus, it is contemplated that the domain order of the bispecific antigen-binding proteins may be: (A)-(B), or (B)-(A).

[0348] The trispecific antigen-binding proteins or bispecific antigen-binding proteins described herein are designed to allow specific targeting of cells expressing a target antigen by recruiting cytotoxic T cells or NK cells. This improves efficacy compared to ADCC (antibody dependent cell-mediated cytotoxicity), which uses full length antibodies directed to a sole antigen and is not capable of directly recruiting cytotoxic T cells. In contrast, by engaging CD3 molecules expressed specifically on these cells, the trispecific antigen-binding proteins or bispecific antigen-binding proteins can cros slink cytotoxic T cells or NK cells with cells expressing a target antigen in a highly specific fashion, thereby directing the cytotoxic potential of the recruited T cell or NK cell towards the target cell. The trispecific antigen-binding proteins or bispecific antigen-binding proteins described herein engage cytotoxic T cells via binding to the surface-expressed CD3 proteins, which form part of the TCR, or CD16A or NKp46, which activates NK cells. Simultaneous binding of several trispecific antigen-binding protein or bispecific antigen-binding proteins to CD3 and to a target antigen expressed on the surface of particular cells causes T cell activation and mediates the subsequent lysis of the particular target antigen expressing cell. Thus, trispecific antigen-binding or bispecific antigen-binding proteins are contemplated to display strong, specific and efficient target cell killing. In some embodiments, the trispecific antigen-binding proteins or bispecific antigen-binding proteins described herein stimulate target cell killing by cytotoxic T cells to eliminate pathogenic cells (e.g., tumor cells, virally or bacterially infected cells, autoreactive T cells, etc). In some embodiments, cells are eliminated selectively, thereby reducing the potential for toxic side effects. In some embodiments anti-41bb or CD137 binding domains are used as the t cell engager.

### Immune Cell Binding Domain

[0349] The specificity of the response of T cells is mediated by the recognition of antigen (displayed in context of a major histocompatibility complex, MHC) by the TCR. As part of the TCR, CD3 is a protein complex that includes a CD3γ (gamma) chain, a CD3δ (delta) chain, and two CD3ε (epsilon) chains which are present on the cell surface. CD3 associates with the α (alpha) and β (beta) chains of the TCR as well as CD3 (zeta) altogether to comprise the complete TCR. Clustering of CD3 on T cells, such as by immobilized anti-CD3 antibodies leads to T cell activation similar to the engagement of the T cell receptor but independent of its clone-typical specificity.

[0350] In one aspect, the bispecific and trispecific proteins described herein comprise a domain which specifically binds to CD3. In one aspect, the trispecific proteins described herein comprise a domain which specifically binds to human CD3. In some embodiments, the trispecific proteins described herein comprise a domain which specifically binds to CD3γ. In some embodiments, the trispecific proteins described herein comprise a domain which specifically binds to CD36. In some embodiments, the trispecific proteins described herein comprise a domain which specifically binds to CD3c.

[0351] In further embodiments, the trispecific proteins described herein comprise a domain which specifically binds to the TCR. In certain instances, the trispecific proteins described herein comprise a domain which specifically binds the α chain of the TCR. In certain instances, the trispecific proteins described herein comprise a domain which specifically binds the β chain of the TCR.

[0352] In some embodiments, a trispecific antigen binding protein or bispecific antigen binding protein comprises a NKp46 specific binder. In some embodiments, a trispecific antigen binding protein or bispecific antigen binding protein comprises a CD16A specific binder.

[0353] In some embodiments, the CD3, TCR, NKp46, or CD16A binding domain of the antigen-binding protein can be any domain that binds to CD3, TCR, NKp46, or CD16A including but not limited to domains from a monoclonal antibody, a polyclonal antibody, a recombinant antibody, a human antibody, a humanized antibody. In some instances, it is beneficial for the CD3, TCR, NKp46, or CD16A binding domain to be derived from the same species in which the trispecific antigen-binding protein will ultimately be used in. For example, for use in humans, it may be beneficial for the CD3, TCR, NKp46, or CD16A binding domain of the trispecific antigen-binding protein to comprise human or humanized residues from the antigen binding domain of an antibody or antibody fragment.

[0354] Thus, in one aspect, the antigen-binding domain comprises a humanized or human antibody or an antibody fragment, or a murine antibody or antibody fragment. In one embodiment, the humanized or human anti-CD3, TCR, NKp46, or CD16A binding domain comprises one or more (e.g., all three) light chain complementary determining region 1 (LC CDR1), light chain complementary determining region 2 (LC CDR2), and light chain complementary determining region 3 (LC CDR3) of a humanized or human anti-CD3, TCR, NKp46, or CD16A binding domain described herein, and/or one or more (e.g., all three) heavy chain complementary determining region 1 (HC CDR1), heavy chain complementary determining region 2 (HC CDR2), and heavy chain complementary determining region 3 (HC CDR3) of a humanized or human anti-CD3, TCR, NKp46, or CD16A binding domain described herein, e.g., a humanized or human anti-CD3, TCR, NKp46, or CD16A binding domain comprising one or more, e.g., all three, LC CDRs and one or more, e.g., all three, HC CDRs.

[0355] In some embodiments, the humanized or human anti-CD3, TCR, NKp46, or CD16A binding domain comprises a humanized or human heavy chain variable region specific to CD3, TCR, NKp46, or CD16A where the heavy chain variable region specific to CD3, TCR, NKp46, or CD16A comprises human or non-human heavy chain CDRs in a human heavy chain framework region.

[0356] In certain instances, the complementary determining regions of the heavy chain and/or the light chain are derived from known anti-CD3 antibodies, such as, for example, muromonab-CD3 (OKT3), otelixizumab (TRX4), teplizumab (MGA031), visilizumab (Nuvion), SP34, TR-66 or X35-3, VIT3, BMA030 (BW264/56), CLB-T3/3, CRIS7, YTH12.5, F111-409, CLB-T3.4.2, TR-66, WT32, SPv-T3b, 11D8, XIII-141, XIII-46, XIII-87, 12F6, T3/RW2-8C8, T3/RW2-4B6, OKT3D, M-T301, SMC2, F101.01, UCHT-1 and WT-31.

[0357] In some embodiments, an anti-NKp46 binding domain comprises an antibody or fragment thereof described in U.S. patent application Ser. No. 16/451,051. In some embodiments, an anti-NKp46 binding domain comprises the antibodies BAB281, 9E2, 195314 or a fragment thereof.

[0358] In one embodiment, the anti-CD3, TCR, NKp46, or CD16A binding domain is a single chain variable fragment (scFv) comprising a light chain and a heavy chain of an amino acid sequence provided herein. In an embodiment, the anti-CD3, TCR, NKp46, or CD16A binding domain comprises: a light chain variable region comprising an amino acid sequence having at least one, two or three modifications (e.g., substitutions) but not more than 30, 20 or 10 modifications (e.g., substitutions) of an amino acid sequence of a light chain variable region provided herein, or a sequence with 95-99% identity with an amino acid sequence provided herein; and/or a heavy chain variable region comprising an amino acid sequence having at least one, two or three modifications (e.g., substitutions) but not more than 30, 20 or 10 modifications (e.g., substitutions) of an amino acid sequence of a heavy chain variable region provided herein, or a sequence with 95-99% identity to an amino acid sequence provided herein. In one embodiment, the humanized or human anti-CD3 binding domain is a scFv, and a light chain variable region comprising an amino acid sequence described herein, is attached to a heavy chain variable region comprising an amino acid sequence described herein, via a scFv linker. The light chain variable region and heavy chain variable region of a scFv can be, e.g., in any of the following orientations: light chain variable region-scFv linker-heavy chain variable region or heavy chain variable region-scFv linker-light chain variable region.

[0359] In some embodiments, CD3, TCR, NKp46, or CD16A binding domain of trispecific antigen-binding protein has an affinity to CD3, TCR, NKp46, or CD16A on CD3, TCR, NKp46, or CD16A expressing cells with a KD of 1000 nM or less, 500 nM or less, 200 nM or less, 100 nM or less, 80 nM or less, 50 nM or less, 20 nM or less, 10 nM or less, 5 nM or less, 1 nM or less, or 0.5 nM or less. In some embodiments, the CD3 binding domain of MSLN trispecific antigen-binding protein has an affinity to CD3ε, γ, or δ with a KD of 1000 nM or less, 500 nM or less, 200 nM or less, 100 nM or less, 80 nM or less, 50 nM or less, 20 nM or less, 10 nM or less, 5 nM or less, 1 nM or less, or 0.5 nM or less. In further embodiments, CD3, TCR, NKp46, or CD16A binding domain of trispecific antigen-binding protein has low affinity to CD3, TCR, NKp46, or CD16A, i.e., about 100 nM or greater.

[0360] The affinity to bind to CD3, TCR, NKp46, or CD16A can be determined, for example, by the ability of the trispecific antigen-binding protein itself or its CD3, TCR, NKp46, or CD16A binding domain to bind to CD3, TCR, NKp46, or CD16A coated on an assay plate; displayed on a microbial cell surface; in solution; etc. The binding activity of the trispecific antigen-binding protein itself or its CD3, TCR, NKp46, or CD16A binding domain of the present disclosure to CD3, TCR, NKp46, or CD16A can be assayed by immobilizing the ligand (e.g., CD3, TCR, NKp46, or CD16A) or the trispecific antigen-binding protein itself or its CD3, TCR, NKp46, or CD16A binding domain, to a bead, substrate, cell, etc. Agents can be added in an appropriate buffer and the binding partners incubated for a period of time at a given temperature. After washes to remove unbound material, the bound protein can be released with, for example, SDS, buffers with a high pH, and the like and analyzed, for example, by Surface Plasmon Resonance (SPR).

[0361] In some embodiments, a bispecific antigen binding protein or bispecific antigen binding protein comprises a TCR binding domain. In some embodiments, a TCR binding domain is a viral antigen or a fragment thereof. In some embodiments, a viral antigen is from the families: Retroviridae (e.g., human immunodeficiency viruses, such as HIV-1 (also referred to as HTLV-III, LAV or HTLV-III/LAV, or HIV-III; and other isolates, such as HIV-LP; Picornaviridae (e.g., polio viruses, hepatitis A virus; enteroviruses, human Coxsackie viruses, rhinoviruses, echoviruses); Calciviridae (e.g., strains that cause gastroenteritis); Togaviridae (e.g., equine encephalitis viruses, rubella viruses); Flaviviridae (e.g., dengue viruses, encephalitis viruses, yellow fever viruses); Coronaviridae (e.g., coronaviruses); Rhabdoviridae (e.g., vesicular stomatitis viruses, rabies viruses); Filoviridae (e.g., Ebola viruses); Paramyxoviridae (e.g., parainfluenza viruses, mumps virus, measles virus, respiratory syncytial virus); Orthomyxoviridae (e.g., influenza viruses); Bunyaviridae (e.g., Hantaan viruses, bunya viruses, phleboviruses and Nairo viruses); Arenaviridae (hemorrhagic fever viruses); Reoviridae (e.g., reoviruses, orbiviruses and rotaviruses); Bornaviridae; Hepadnaviridae (Hepatitis B virus); Parvoviridae (parvoviruses); Papovaviridae (papilloma viruses, polyoma viruses); Adenoviridae (most adenoviruses); Herpesviridae (herpes simplex virus (HSV) 1 and 2, varicella zoster virus, cytomegalovirus (CMV), herpes virus; Poxviridae (variola viruses, vaccinia viruses, pox viruses); and Iridoviridae (e.g., African swine fever virus); and unclassified viruses (e.g., the agent of delta hepatitis (thought to be a defective satellite of hepatitis B virus), Hepatitis C; Norwalk and related viruses, and astroviruses).

### Linkers

[0362] In the trispecific proteins described herein, the domains are linked by internal linkers L1 and L2, where L1 links the first and second domain of the trispecific proteins and L2 links the second and third domains of the trispecific proteins. In some embodiments, linkers L1 and L2 have an optimized length and/or amino acid composition. In some embodiments, linkers L1 and L2 are the same length and amino acid composition. In other embodiments, L1 and L2 are different. In certain embodiments, internal linkers L1 and/or L2 consist of 0, 1, 2, 3, 4, 5, 6, 7, 8, 9, 10, 11 or 12 amino acid residues. Thus, in certain instances, the internal linkers consist of about 12 or less amino acid residues. In the case of 0 amino acid residues, the internal linker is a peptide bond. In certain embodiments, internal linkers L1 and/or L2 consist of 15, 20 or 25 amino acid residues. In some embodiments, these internal linkers consist of about 3 to about 15, for example 8, 9 or 10 contiguous amino acid residues. Regarding the amino acid composition of the internal linkers L1 and L2, peptides are selected with properties that confer flexibility to the trispecific proteins, do not interfere with the binding domains as well as resist cleavage from proteases. For example, glycine and serine residues generally provide protease resistance. Examples of internal linkers suitable for linking the domains in the trispecific proteins include but are not limited to (GS)n, (GGS)n, (GGGS)n, (GGSG)n, (GGSGG)n, (GGGGS)n, (GGGGG)n, or (GGG)n, wherein n is 1, 2, 3, 4, 5, 6, 7, 8, 9, or 10. In one embodiment, internal linker L1 and/or L2 is (GGGGS)4 or (GGGGS)₃.

### Half-Life Extension Domain

[0363] Contemplated herein are domains which extend the half-life of an antigen-binding domain. Such domains are contemplated to include but are not limited to Albumin binding domains, Fc domains, small molecules, and other half-life extension domains known in the art.

[0364] Human albumin (ALB) is the most abundant protein in plasma, present at about 50 mg/ml and has a half-life of around 20 days in humans. ALB serves to maintain plasma pH, contributes to colloidal blood pressure, functions as carrier of many metabolites and fatty acids, and serves as a major drug transport protein in plasma.

[0365] Noncovalent association with albumin extends the elimination half-time of short lived proteins.

[0366] In one aspect, the trispecific proteins described herein comprise a half-life extension domain, for example a domain which specifically binds to ALB. In some embodiments, the ALB binding domain of a trispecific antigen-binding protein can be any domain that binds to ALB including but not limited to domains from a monoclonal antibody, a polyclonal antibody, a recombinant antibody, a human antibody, a humanized antibody. In some embodiments, the ALB binding domain is a single chain variable fragments (scFv), single-domain antibody such as a heavy chain variable domain (VH), a light chain variable domain (VL) and a variable domain (VHH) of camelid derived single domain antibody, peptide, ligand or small molecule entity specific for HSA. In certain embodiments, the ALB binding domain is a single-domain antibody. In other embodiments, the HSA binding domain is a peptide. In further embodiments, the HSA binding domain is a small molecule. It is contemplated that the HSA binding domain of MSLN trispecific antigen-binding protein is fairly small and no more than 25 kD, no more than 20 kD, no more than 15 kD, or no more than 10 kD in some embodiments. In certain instances, the ALB binding is 5 kD or less if it is a peptide or small molecule entity.

[0367] The half-life extension domain of a trispecific antigen-binding protein provides for altered pharmacodynamics and pharmacokinetics of the trispecific antigen-binding protein itself. As above, the half-life extension domain extends the elimination half-time. The half-life extension domain also alters pharmacodynamic properties including alteration of tissue distribution, penetration, and diffusion of the trispecific antigen-binding protein. In some embodiments, the half-life extension domain provides for improved tissue (including tumor) targeting, tissue distribution, tissue penetration, diffusion within the tissue, and enhanced efficacy as compared with a protein without a half-life extension domain. In one embodiment, therapeutic methods effectively and efficiently utilize a reduced amount of the trispecific antigen-binding protein, resulting in reduced side effects, such as reduced non-tumor cell cytotoxicity.

[0368] Further, the binding affinity of the half-life extension domain can be selected so as to target a specific elimination half-time in a particular trispecific antigen-binding protein. Thus, in some embodiments, the half-life extension domain has a high binding affinity. In other embodiments, the half-life extension domain has a medium binding affinity. In yet other embodiments, the half-life extension domain has a low or marginal binding affinity. Exemplary binding affinities include KD concentrations at 10 nM or less (high), between 10 nM and 100 nM (medium), and greater than 100 nM (low). As above, binding affinities to ALB are determined by known methods such as Surface Plasmon Resonance (SPR).

### Liver Retention Domain

[0369] Contemplated herein are domains which allows for and promotes a higher retention of the trispecific antigen-binding protein within liver. The liver retention domain of the trispecific antigen-binding protein is directed to targeting a liver cell moiety. In an embodiment, a liver cell includes but is not limited to a hepatocyte, hepatic stellate cell, sinusoidal endothelial cell.

[0370] In an embodiment, a liver cell contains a receptor that binds to a liver targeting moiety. In an embodiment, the liver targeting moiety includes, but is not limited to lactose, cyanuric chloride, cellobiose, polylsine, polyarginine, Mannose-6-phosphate, PDGF, human serum albumin, galactoside, galactosamine, linoleic acid, Apoliopoprotein A-1, Acetyl CKNEKKNIERNNKLKQPP-amide, glycyrrhizin, lactobionic acid, Mannose-BSA, BSA, poly-ACO-HAS, KLGR peptide, hyaluronic acid, IFN-alpha, cRGD peptide, 6-phosphate-HSA, retinol, lactobiotin, galactoside, pullulan, soybean steryglucoside, asialoorosomucoid, glycyrrhetinic acid/glycyrrhizin, linoleic acid, AMD3100, cleavable hyaluronic acid-glycyrrhetinic acid, Hepatitis B virus pre-S1 derived lipoprotein, Apo-A 1, or LDL. In an embodiment, the liver cell receptor includes but is not limited to galactose receptor, mannose receptor, scavenger receptor, low-density lipoprotein receptor, HARE, CD44, IFNα receptor, collagen type VI receptor, 6-phosphate/insulin-like growth factor 2 receptor, platelet-derived growth factor receptor β, RBP receptor, αVβ3 integrin receptor, ASGP receptor, glycyrrhetinic acid/glycyrrhizin receptor, PPAR, Heparan sulfate glycosaminoglycan receptor, CXC receptor type 4, glycyrrhetinic acid receptor, HBVP receptor, HDL receptor, scavenger receptor class B member 1 LDL receptor or combination thereof.

### Target Antigen Binding Domain

[0371] The trispecific antigen-binding proteins and bispecific antigen-binding proteins described herein comprise a domain that binds to a target antigen. A target antigen is involved in and/or associated with a disease, disorder or condition, e.g., cancer. In some embodiments, a target antigen is a tumor antigen. In some embodiments, the target antigen is NY-ESO-1, SSX-2, Sp 17, AFP, Glypican-3, Gpa33, Annexin-A2, WT1, PSMA, Midkine, PRAME, Survivin, MUC-1. P53, CEA, RAS, Hsp70, Hsp27, squamous cell carcinoma antigen (SCCA), GP73, TAG-72, or a protein in the MAGE family.

[0372] In some embodiments, a target antigen is one found on a non-liver tumor cell that has metastasized into the liver. In some embodiments, a bispecific antigen-binding protein or trispecific antigen binding protein comprises a target antigen binding domain specific for group CD19, CD123, CD22, CD30, CD171, CS-1, C-type lectin-like molecule-1, CD33, epidermal growth factor receptor variant III (EGFRvIII), ganglioside G2 (GD2), ganglioside GD3, TNF receptor family member B cell maturation (BCMA), Tn antigen ((Tn Ag) or (GaINAca-Ser/Thr)), prostate-specific membrane antigen (PSMA), Receptor tyrosine kinase-like orphan receptor 1 (ROR1), Fms-Like Tyrosine Kinase 3 (FLT3), Tumor-associated glycoprotein 72 (TAG72), CD38, CD44v6, Carcinoembryonic antigen (CEA), Epithelial cell adhesion molecule (EPCAM), B7H3 (CD276), KIT (CD117), Interleukin-13 receptor subunit alpha-2, mesothelin, Interleukin 11 receptor alpha (IL-11Ra), prostate stem cell antigen (PSCA), Protease Serine 21, vascular endothelial growth factor receptor 2 (VEGFR2), Lewis(Y) antigen, CD24, Platelet-derived growth factor receptor beta (PDGFR-beta), Stage-specific embryonic antigen-4 (SSEA-4), CD20, Folate receptor alpha, HER2, HERS, Mucin 1, cell surface associated (MUC1), epidermal growth factor receptor (EGFR), neural cell adhesion molecule (NCAM), Prostase, prostatic acid phosphatase (PAP), elongation factor 2 mutated (ELF2M), Ephrin B2, fibroblast activation protein alpha (FAP), insulin-like growth factor 1 receptor (IGF-I receptor), carbonic anhydrase IX (CAIX), Proteasome (Prosome, Macropain) Subunit, Beta Type, 9 (LMP2), glycoprotein 100 (gp100), oncogene fusion protein consisting of breakpoint cluster region (BCR) and Abelson murine leukemia viral oncogene homolog 1 (Abl) (bcr-abl), tyrosinase, ephrin type-A receptor 2 (EphA2), Fucosyl GM1, sialyl Lewis adhesion molecule (sLe), ganglioside GM3, transglutaminase 5 (TGS5), high molecular weight-melanoma-associated antigen (HMWMAA), o-acetyl-GD2 ganglioside (OAcGD2), Folate receptor beta, tumor endothelial marker 1 (TEM1/CD248), tumor endothelial marker 7-related (TEM7R), claudin 6 (CLDN6), claudin 18.2 (CLDN18.2), thyroid stimulating hormone receptor (TSHR), G protein-coupled receptor class C group 5, member D (GPRC5D), chromosome X open reading frame 61 (CXORF61), CD97, or CD179a. In some embodiments, a target antigen is an antigen associated with a viral disease, e.g., a viral antigen. In some embodiments, a target antigen is a hepatitis A, hepatitis B, hepatitis C, hepatitis D or hepatitis E antigen.

[0373] The design of the trispecific antigen-binding proteins described herein allows the binding domain to a liver target antigen to be flexible in that the binding domain to a liver target antigen can be any type of binding domain, including but not limited to, domains from a monoclonal antibody, a polyclonal antibody, a recombinant antibody, a human antibody, a humanized antibody. In some embodiments, the binding domain to a liver target antigen is a single chain variable fragments (scFv), single-domain antibody such as a heavy chain variable domain (VH), a light chain variable domain (VL) and a variable domain (VHH) of camelid derived single domain antibody. In other embodiments, the binding domain to a liver target antigen is a non-Ig binding domain, i.e., antibody mimetic, such as anticalins, affilins, affibody molecules, affimers, affitins, alphabodies, avimers, DARPins, fynomers, kunitz domain peptides, and monobodies. In further embodiments, the binding domain to a liver target antigen is a ligand or peptide that binds to or associates with a target antigen.

### 3.7 PAH

[0374] In some embodiments, the present invention provides methods and compositions for delivering circRNA encoding PAH to a subject for the treatment of phenylketonuria (PKU). A suitable PAH circRNA encodes any full length, fragment or portion of a PAH protein which can be substituted for naturally-occurring PAH protein activity and/or reduce the intensity, severity, and/or frequency of one or more symptoms associated with PKU.

[0375] In some embodiments, a suitable RNA sequence for the present invention comprises a circRNA sequence encoding human PAH protein.

[0376] In some embodiments, a suitable RNA sequence may be an RNA sequence that encodes a homolog or an analog of human PAH. As used herein, a homolog or an analog of human PAH protein may be a modified human PAH protein containing one or more amino acid substitutions, deletions, and/or insertions as compared to a wild-type or naturally-occurring human PAH protein while retaining substantial PAH protein activity.

[0377] The present invention may be used to treat a subject who is suffering from or susceptible to Phenylketonuria (PKU). PKU is an autosomal recessive metabolic genetic disorder characterized by a mutation in the gene for the hepatic enzyme phenylalanine hydroxylase (PAH), rendering it nonfunctional. PAH is necessary to metabolize the amino acid phenylalanine (Phe) to the amino acid tyrosine (Tyr). When PAH activity is reduced, phenylalanine accumulates and is converted into phenylpyruvate (also known as phenylketone) which can be detected in the urine.

[0378] Phenylalanine is a large, neutral amino acid (LNAA). LNAAs compete for transport across the blood-brain barrier (BBB) via the large neutral amino acid transporter (LNAAT). Excess Phe in the blood saturates the transporter and tends to decrease the levels of other LNAAs in the brain. Because several of these other amino acids are necessary for protein and neurotransmitter synthesis, Phe buildup hinders the development of the brain, and can cause mental retardation.

[0379] In addition to hindered brain development, the disease can present clinically with a variety of symptoms including seizures, albinism hyperactivity, stunted growth, skin rashes (eczema), microcephaly, and/or a “musty” odor to the baby's sweat and urine, due to phenylacetate, one of the ketones produced). Untreated children are typically normal at birth, but have delayed mental and social skills, have a head size significantly below normal, and often demonstrate progressive impairment of cerebral function. As the child grows and develops, additional symptoms including hyperactivity, jerking movements of the arms or legs, EEG abnormalities, skin rashes, tremors, seizures, and severe learning disabilities tend to develop. However, PKU is commonly included in the routine newborn screening panel of most countries that is typically performed 2-7 days after birth.

[0380] If PKU is diagnosed early enough, an affected newborn can grow up with relatively normal brain development, but only by managing and controlling Phe levels through diet, or a combination of diet and medication. All PKU patients must adhere to a special diet low in Phe for optimal brain development. The diet requires severely restricting or eliminating foods high in Phe, such as meat, chicken, fish, eggs, nuts, cheese, legumes, milk and other dairy products. Starchy foods, such as potatoes, bread, pasta, and corn, must be monitored. Infants may still be breastfed to provide all of the benefits of breastmilk, but the quantity must also be monitored and supplementation for missing nutrients will be required. The sweetener aspartame, present in many diet foods and soft drinks, must also be avoided, as aspartame contains phenylalanine.

[0381] Throughout life, patients can use supplementary infant formulas, pills or specially formulated foods to acquire amino acids and other necessary nutrients that would otherwise be deficient in a low-phenylalanine diet. Some Phe is required for the synthesis of many proteins and is required for appropriate growth, but levels of it must be strictly controlled in PKU patients. Additionally, PKU patients must take supplements of tyrosine, which is normally derived from phenylalanine. Other supplements can include fish oil, to replace the long chain fatty acids missing from a standard Phe-free diet and improve neurological development and iron or carnitine. Another potential therapy for PKU is tetrahydrobiopterin (BH4), a cofactor for the oxidation of Phe that can reduce blood levels of Phe in certain patients. Patients who respond to BH4 therapy may also be able to increase the amount of natural protein that they can eat.

[0382] In some embodiments, the expression of PAH protein is detectable in liver, kidney, heart, spleen, serum, brain, skeletal muscle, lymph nodes, skin, and/or cerebrospinal fluid.

[0383] In some embodiments, administering the provided composition results in the expression of a PAH protein level at or above about 100 ng/mg, about 200 ng/mg, about 300 ng/mg, about 400 ng/mg, about 500 ng/mg, about 600 ng/mg, about 700 ng/mg, about 800 ng/mg, about 900 ng/mg, about 1000 ng/mg, about 1200 ng/mg or about 1400 ng/mg of total protein in the liver.

[0384] In some embodiments, the expression of the PAH protein is detectable 1 to 96 hours after administration. For example, in some embodiments, expression of PAH protein is detectable 1 to 84 hours, 1 to 72 hours, 1 to 60 hours, 1 to 48 hours, 1 to 36 hours, 1 to 24 hours, 1 to 12 hours, 1 to 10 hours, 1 to 8 hours, 1 to 6 hours, 1 to 4 hours, 1 to 2 hours, 2 to 96 hours, 2 to 84 hours, 2 to 72 hours, 2 to 60 hours, 2 to 48 hours, 2 to 36 hours, 2 to 24 hours, 2 to 12 hours, 2 to 10 hours, 2 to 8 hours, 2 to 6 hours, 2 to 4 hours, 4 to 96 hours, 4 to 84 hours, 4 to 72 hours, 4 to 60 hours, 4 to 48 hours, 4 to 36 hours, 4 to 24 hours, 4 to 12 hours, 4 to 10 hours, 4 to 8 hours, 4 to 6 hours, 6 to 96 hours, 6 to 84 hours, 6 to 72 hours, 6 to 60 hours, 6 to 48 hours, 6 to 36 hours, 6 to 24 hours, 6 to 12 hours, 6 to 10 hours, 6 to 8 hours, 8 to 96 hours, 8 to 84 hours, 8 to 72 hours, 8 to 60 hours, 8 to 48 hours, 8 to 36 hours, 8 to 24 hours, 8 to 12 hours, 8 to 10 hours, 10 to 96 hours, 10 to 84 hours, 10 to 72 hours, 10 to 60 hours, 10 to 48 hours, 10 to 36 hours, 10 to 24 hours, 10 to 12 hours, 12 to 96 hours, 12 to 84 hours, 12 to 72 hours, 12 to 60 hours, 12 to 48 hours, 12 to 36 hours, 12 to 24 hours, 24 to 96 hours, 24 to 84 hours, 24 to 72 hours, 24 to 60 hours, 24 to 48 hours, 24 to 36 hours, 36 to 96 hours, 36 to 84 hours, 36 to 72 hours, 36 to 60 hours, 36 to 48 hours, 48 to 96 hours, 48 to 84 hours, 48 to 72 hours, 48 to 60 hours, 48 to 84 hours, 48 to 72 hours, 48 to 60 hours, 60 to 96 hours, 60 to 84 hours, 60 to 72 hours, 72 hours to 96 hours, 72 hours to 84 hours, or 84 hours to 96 hours after administration. For example, in certain embodiments, the expression of the PAH protein is detectable 6, 12, 18, 24, 30, 36, 42, 48, 54, 60, 66, and/or 72 hours after the administration. In some embodiments, the expression of the PAH protein is detectable 1 day to 7 days after the administration. For example, in some embodiments, PAH protein is detectable 1 day, 2 days, 3 days, 4 days, 5 days, 6 days, and/or 7 days after the administration. In some embodiments, the expression of the PAH protein is detectable 1 week to 8 weeks after the administration. For example, in some embodiments, the expression of the PAH protein is detectable 1 week, 2 weeks, 3 weeks, and/or 4 weeks after the administration. In some embodiments, the expression of the PAH protein is detectable after a month after the administration.

### 3.8 CPS1

[0385] In some embodiments, the present invention provides methods and compositions for delivering circRNA encoding CPS1 to a subject for the treatment of CPS1 deficiency. A suitable CPS1 circRNA encodes any full length, fragment or portion of a CPS1 protein which can be substituted for naturally-occurring CPS1 protein activity and/or reduce the intensity, severity, and/or frequency of one or more symptoms associated with CPS1 deficiency.

[0386] In some embodiments, a suitable RNA sequence for the present invention comprises a circRNA sequence encoding human CPS1 protein.

[0387] In some embodiments, a suitable RNA sequence may be an RNA sequence that encodes a homolog or an analog of human CPS1. As used herein, a homolog or an analog of human CPS1 protein may be a modified human CPS1 protein containing one or more amino acid substitutions, deletions, and/or insertions as compared to a wild-type or naturally-occurring human CPS1 protein while retaining substantial CPS1 protein activity.

[0388] Carbamoyl phosphate synthetase I (CPS1) catalyzes the conversion of ammonia, bicarbonate and 2 ATP with formation of carbamoyl phosphate in the first step of the urea cycle. It also plays a role in the biosynthesis of arginine, which in turn is a substrate for the biosynthesis of NO, e.g. in the case of an endotoxin shock (c.f. Shoko Tabuchi et al., Regulation of Genes for Inducible Nitric Oxide Synthase and Urea Cycle Enzymes in Rat Liver in Endotoxin Shock, Biochemical and Biophysical Research Communications 268, 221-224 (2000)). CPS 1 should be distinguished from the cytosolic enzyme CPS 2, which likewise plays a role in the urea cycle but processes the substrate glutamine. It is known that CPS 1 is localized in mitochondria and occurs in this form in large amounts in liver tissue (it accounts for 2-6% of total liver protein). Its amino acid sequence and genetic localization have long been known (c.f. Haraguchi Y. et al., Cloning and sequence of a cDNA encoding human carbamyl phosphate synthetase I: molecular analysis of hyperammonemia, Gene 1991, Nov. 1; 107 (2); 335-340; cf. also the publication WO 03/089933 A1 of the Applicant). Regarding its physiological role, reference may be made to review articles such as, for example, H. M. Holder et al., Carbamoyl phosphate synthetase: an amazing biochemical odyssey from substrate to product, CMLS, Cell. Mol. Life Sci. 56 (1999) 507-522, and the literature referred to therein, and the introduction to the publication by Mikiko Ozaki et al., Enzyme-Linked Immunosorbent Assay of Carbamoylphosphate Synthetase I: Plasma Enzyme in Rat Experimental Hepatitis and Its Clearance, Enzyme Protein 1994, 95:48:213-221.

[0389] Carbamoyl phosphate synthetase I (CPS1) deficiency is a genetic disorder characterized by a mutation in the gene for the enzyme Carbamoyl phosphate synthetase I, affecting its ability to catalyze synthesis of carbamoyl phosphate from ammonia and bicarbonate. This reaction is the first step of the urea cycle, which is important in the removal of excess urea from cells. Defects in the CPS1 protein disrupt the urea cycle and prevent the liver from properly processing excess nitrogen into urea.

[0390] In some embodiments, administering the provided composition results in the expression of a CPS1 protein level at or above about 100 ng/mg, about 200 ng/mg, about 300 ng/mg, about 400 ng/mg, about 500 ng/mg, about 600 ng/mg, about 700 ng/mg, about 800 ng/mg, about 900 ng/mg, about 1000 ng/mg, about 1200 ng/mg or about 1400 ng/mg of total protein in the liver.

[0391] In some embodiments, the expression of the CPS1 protein is detectable 1 to 96 hours after administration. For example, in some embodiments, expression of CPS1 protein is detectable 1 to 84 hours, 1 to 72 hours, 1 to 60 hours, 1 to 48 hours, 1 to 36 hours, 1 to 24 hours, 1 to 12 hours, 1 to 10 hours, 1 to 8 hours, 1 to 6 hours, 1 to 4 hours, 1 to 2 hours, 2 to 96 hours, 2 to 84 hours, 2 to 72 hours, 2 to 60 hours, 2 to 48 hours, 2 to 36 hours, 2 to 24 hours, 2 to 12 hours, 2 to 10 hours, 2 to 8 hours, 2 to 6 hours, 2 to 4 hours, 4 to 96 hours, 4 to 84 hours, 4 to 72 hours, 4 to 60 hours, 4 to 48 hours, 4 to 36 hours, 4 to 24 hours, 4 to 12 hours, 4 to 10 hours, 4 to 8 hours, 4 to 6 hours, 6 to 96 hours, 6 to 84 hours, 6 to 72 hours, 6 to 60 hours, 6 to 48 hours, 6 to 36 hours, 6 to 24 hours, 6 to 12 hours, 6 to 10 hours, 6 to 8 hours, 8 to 96 hours, 8 to 84 hours, 8 to 72 hours, 8 to 60 hours, 8 to 48 hours, 8 to 36 hours, 8 to 24 hours, 8 to 12 hours, 8 to 10 hours, 10 to 96 hours, 10 to 84 hours, 10 to 72 hours, 10 to 60 hours, 10 to 48 hours, 10 to 36 hours, 10 to 24 hours, 10 to 12 hours, 12 to 96 hours, 12 to 84 hours, 12 to 72 hours, 12 to 60 hours, 12 to 48 hours, 12 to 36 hours, 12 to 24 hours, 24 to 96 hours, 24 to 84 hours, 24 to 72 hours, 24 to 60 hours, 24 to 48 hours, 24 to 36 hours, 36 to 96 hours, 36 to 84 hours, 36 to 72 hours, 36 to 60 hours, 36 to 48 hours, 48 to 96 hours, 48 to 84 hours, 48 to 72 hours, 48 to 60 hours, 48 to 84 hours, 48 to 72 hours, 48 to 60 hours, 60 to 96 hours, 60 to 84 hours, 60 to 72 hours, 72 hours to 96 hours, 72 hours to 84 hours, or 84 hours to 96 hours after administration. For example, in certain embodiments, the expression of the CPS1 protein is detectable 6, 12, 18, 24, 30, 36, 42, 48, 54, 60, 66, and/or 72 hours after the administration. In some embodiments, the expression of the CPS1 protein is detectable 1 day to 7 days after the administration. For example, in some embodiments, CPS1 protein is detectable 1 day, 2 days, 3 days, 4 days, 5 days, 6 days, and/or 7 days after the administration. In some embodiments, the expression of the CPS1 protein is detectable 1 week to 8 weeks after the administration. For example, in some embodiments, CPS1 protein is detectable 1 week, 2 weeks, 3 weeks, and/or 4 weeks after the administration. In some embodiments, the expression of the CPS1 protein is detectable after a month after the administration.

[0392] In some embodiments, administering of the composition results in reduced ammonia levels in a subject as compared to baseline levels before treatment. Typically, baseline levels are measured in the subject immediately before treatment. Typically, ammonia levels are measured in a biological sample. Suitable biological samples include, for example, whole blood, plasma, serum, urine or cerebral spinal fluid.

[0393] In some embodiments, administering the composition results in reduced ammonia levels in a biological sample (e.g., a serum, plasma, or urine sample) by at least about 10%, at least about 15%, at least about 20%, at least about 25%, at least about 30%, at least about 35%, at least about 40%, at least about 45%, at least about 50%, at least about 55%, at least about 60%, at least about 65%, at least about 70%, at least about 75%, at least about 80%, at least about 85%, at least about 90%, or at least about 95% as compared to baseline levels in a subject immediately before treatment.

[0394] In some embodiments, administering the composition provided herein results in reduced ammonia levels in plasma or serum as compared to baseline ammonia levels in a subject immediately before treatment. In some embodiments, administering the provided composition results in reduced ammonia levels in plasma or serum as compared to the ammonia levels in subjects who are not treated. In some embodiments, administering the composition results in reduction of ammonia levels to about 3000 μmol/L or less, about 2750 μmol/L or less, about 2500 μmol/L or less, about 2250 μmol/L or less, about 2000 μmol/L or less, about 1750 μmol/L or less, about 1500 μmol/L or less, about 1250 μmol/L or less, about 1000 μmol/L or less, about 750 μmol/L or less, about 500 μmol/L or less, about 250 μmol/L or less, about 100 μmol/L or less or about 50 μmol/L or less in the plasma or serum of the subject. In a particular embodiment, administering the composition results in reduction of ammonia levels to about 50 μmol/L or less in the plasma or serum.

### 3.9 ADAMTS13

[0395] In some embodiments, the present invention provides methods and compositions for delivering circRNA encoding ADAMTS13 to a subject for the treatment of thrombotic thrombocytopenic purpura (TTP). A suitable ADAMTS13 circRNA encodes any full length ADAMTS13 protein, or functional fragment or portion thereof, which can be substituted for naturally-occurring ADAMTS13 protein and/or reduce the intensity, severity, and/or frequency of one or more symptoms associated with TTP.

[0396] In some embodiments, the RNA sequence of the present invention comprises a circRNA sequence encoding human ADAMTS13 protein.

[0397] In some embodiments, the RNA sequence may be an RNA sequence that encodes a homolog or an analog of human ADAMTS13. As used herein, a homolog or an analog of human ADAMTS13 protein may be a modified human ADAMTS13 protein containing one or more amino acid substitutions, deletions, and/or insertions as compared to a wild-type or naturally-occurring human ADAMTS13 protein while retaining substantial ADAMTS13 protein activity.

[0398] The ADAMTS13 enzyme cleaves von Willebrand factor, which, in its un-cleaved form, interacts with platelets and causes them to stick together and adhere to the walls of blood vessels, forming clots. Defects in ADAMTS13 are associated with TTP.

[0399] In some embodiments, administering the provided composition results in the expression of a ADAMTS13 protein level at or above about 100 ng/mg, about 200 ng/mg, about 300 ng/mg, about 400 ng/mg, about 500 ng/mg, about 600 ng/mg, about 700 ng/mg, about 800 ng/mg, about 900 ng/mg, about 1000 ng/mg, about 1200 ng/mg or about 1400 ng/mg of total protein in the liver.

[0400] In some embodiments, the expression of the ADAMTS13 protein is detectable 1 to 96 hours after administration. For example, in some embodiments, expression of ADAMTS13 protein is detectable 1 to 84 hours, 1 to 72 hours, 1 to 60 hours, 1 to 48 hours, 1 to 36 hours, 1 to 24 hours, 1 to 12 hours, 1 to 10 hours, 1 to 8 hours, 1 to 6 hours, 1 to 4 hours, 1 to 2 hours, 2 to 96 hours, 2 to 84 hours, 2 to 72 hours, 2 to 60 hours, 2 to 48 hours, 2 to 36 hours, 2 to 24 hours, 2 to 12 hours, 2 to 10 hours, 2 to 8 hours, 2 to 6 hours, 2 to 4 hours, 4 to 96 hours, 4 to 84 hours, 4 to 72 hours, 4 to 60 hours, 4 to 48 hours, 4 to 36 hours, 4 to 24 hours, 4 to 12 hours, 4 to 10 hours, 4 to 8 hours, 4 to 6 hours, 6 to 96 hours, 6 to 84 hours, 6 to 72 hours, 6 to 60 hours, 6 to 48 hours, 6 to 36 hours, 6 to 24 hours, 6 to 12 hours, 6 to 10 hours, 6 to 8 hours, 8 to 96 hours, 8 to 84 hours, 8 to 72 hours, 8 to 60 hours, 8 to 48 hours, 8 to 36 hours, 8 to 24 hours, 8 to 12 hours, 8 to 10 hours, 10 to 96 hours, 10 to 84 hours, 10 to 72 hours, 10 to 60 hours, 10 to 48 hours, 10 to 36 hours, 10 to 24 hours, 10 to 12 hours, 12 to 96 hours, 12 to 84 hours, 12 to 72 hours, 12 to 60 hours, 12 to 48 hours, 12 to 36 hours, 12 to 24 hours, 24 to 96 hours, 24 to 84 hours, 24 to 72 hours, 24 to 60 hours, 24 to 48 hours, 24 to 36 hours, 36 to 96 hours, 36 to 84 hours, 36 to 72 hours, 36 to 60 hours, 36 to 48 hours, 48 to 96 hours, 48 to 84 hours, 48 to 72 hours, 48 to 60 hours, 48 to 84 hours, 48 to 72 hours, 48 to 60 hours, 60 to 96 hours, 60 to 84 hours, 60 to 72 hours, 72 hours to 96 hours, 72 hours to 84 hours, or 84 hours to 96 hours after administration. For example, in certain embodiments, the expression of the ADAMTS13 protein is detectable 6, 12, 18, 24, 30, 36, 42, 48, 54, 60, 66, and/or 72 hours after the administration. In some embodiments, the expression of the ADAMTS13 protein is detectable 1 day to 7 days after the administration. For example, in some embodiments, ADAMTS13 protein is detectable 1 day, 2 days, 3 days, 4 days, 5 days, 6 days, and/or 7 days after the administration. In some embodiments, the expression of the ADAMTS13 protein is detectable 1 week to 8 weeks after the administration. For example, in some embodiments, ADAMTS13 protein is detectable 1 week, 2 weeks, 3 weeks, and/or 4 weeks after the administration. In some embodiments, the expression of the ADAMTS13 protein is detectable after a month after the administration.

[0401] In some embodiments, administering the composition results in reduced von Willebrand factor (vWF) levels in a subject as compared to baseline vWR levels before treatment. Typically, the baseline levels are measured in the subject immediately before treatment. Typically, vWF levels are measured in a biological sample. Suitable biological samples include, for example, whole blood, plasma or serum.

[0402] In some embodiments, administering the composition results in reduced vWF levels in a biological sample taken from the subject by at least about 10%, 20%, 30%, 40%, 50%, 60%, 70%, 80%, 90%, or 95% as compared to baseline vWF levels immediately before treatment. In some embodiments, administering the composition results in reduced plasma vWF levels in the subject to less than about 2000 μM, 1500 μM, 1000 μM, 750 μM, 500 μM, 250 μM, 100 μM, 90 μM, 80 μM, 70 μM, 60 μM, 50 μM, 40 μM, or 30

[0403] In some embodiments, administering the provided composition results in reduced vWF levels in plasma or serum samples taken from the subject as compared to baseline vWF levels immediately before treatment. In some embodiments, administering the provided composition results in reduced vWF levels in plasma or serum as compared to vWF levels in subjects who are not treated. In some embodiments, administering the composition results in reduction of vWF levels to about 3000 μmol/L or less, about 2750 μmol/L or less, about 2500 μmol/L or less, about 2250 μmol/L or less, about 2000 μmol/L or less, about 1750 μmol/L or less, about 1500 μmol/L or less, about 1250 μmol/L or less, about 1000 μmol/L or less, about 750 μmol/L or less, about 500 μmol/L or less, about 250 μmol/L or less, about 100 μmol/L or less or about 50 μmol/L or less in the plasma or serum. In a particular embodiment, administering the composition results in reduction of vWF levels to about 50 μmol/L or less in the plasma or serum

### 4. Production of Polynucleotides

[0404] The vectors provided herein can be made using standard techniques of molecular biology. For example, the various elements of the vectors provided herein can be obtained using recombinant methods, such as by screening cDNA and genomic libraries from cells, or by deriving the polynucleotides from a vector known to include the same.

[0405] The various elements of the vectors provided herein can also be produced synthetically, rather than cloned, based on the known sequences. The complete sequence can be assembled from overlapping oligonucleotides prepared by standard methods and assembled into the complete sequence. See, e.g., Edge, Nature (1981) 292:756; Nambair et al., Science (1984) 223: 1299; and Jay et al., J. Biol. Chem. (1984) 259:631 1.

[0406] Thus, particular nucleotide sequences can be obtained from vectors harboring the desired sequences or synthesized completely or in part using various oligonucleotide synthesis techniques known in the art, such as site-directed mutagenesis and polymerase chain reaction (PCR) techniques where appropriate. One method of obtaining nucleotide sequences encoding the desired vector elements is by annealing complementary sets of overlapping synthetic oligonucleotides produced in a conventional, automated polynucleotide synthesizer, followed by ligation with an appropriate DNA ligase and amplification of the ligated nucleotide sequence via PCR. See, e.g., Jayaraman et al., Proc. Natl. Acad. Sci. USA (1991) 88:4084-4088. Additionally, oligonucleotide-directed synthesis (Jones et al., Nature (1986) 54:75-82), oligonucleotide directed mutagenesis of preexisting nucleotide regions (Riechmann et al., Nature (1988) 332:323-327 and Verhoeyen et al., Science (1988) 239: 1534-1536), and enzymatic filling-in of gapped oligonucleotides using T4 DNA polymerase (Queen et al., Proc. Natl. Acad. Sci. USA (1989) 86: 10029-10033) can be used.

[0407] The precursor RNA provided herein can be generated by incubating a vector provided herein under conditions permissive of transcription of the precursor RNA encoded by the vector. For example, in some embodiments a precursor RNA is synthesized by incubating a vector provided herein that comprises an RNA polymerase promoter upstream of its 5′ duplex forming region and/or expression sequence with a compatible RNA polymerase enzyme under conditions permissive of in vitro transcription. In some embodiments, the vector is incubated inside of a cell by a bacteriophage RNA polymerase or in the nucleus of a cell by host RNA polymerase II.

[0408] In certain embodiments, provided herein is a method of generating precursor RNA by performing in vitro transcription using a vector provided herein as a template (e.g., a vector provided herein with a RNA polymerase promoter positioned upstream of the 5′ homology region).

[0409] In certain embodiments, the resulting precursor RNA can be used to generate circular RNA (e.g., a circular RNA polynucleotide provided herein) by incubating it in the presence of magnesium ions and guanosine nucleotide or nucleoside at a temperature at which RNA circularization occurs (e.g., between 20° C. and 60° C.).

[0410] Thus, in certain embodiments provided herein is a method of making circular RNA. In certain embodiments, the method comprises synthesizing precursor RNA by transcription (e.g., run-off transcription) using a vector provided herein (e.g., a vector comprising, in the following order, a 5′ homology region, a 3′ group I intron fragment, a first spacer, an Internal Ribosome Entry Site (IRES), an expression sequence, a second spacer, a 5′ group I intron fragment, and a 3′ homology region) as a template, and incubating the resulting precursor RNA in the presence of divalent cations (e.g., magnesium ions) and GTP such that it circularizes to form circular RNA. In some embodiments, the precursor RNA disclosed herein is capable of circularizing in the absence of magnesium ions and GTP and/or without the step of incubation with magnesium ions and GTP. It has been discovered that circular RNA has reduced immunogenicity relative to a corresponding mRNA, at least partially because the mRNA contains an immunogenic 5′ cap. When transcribing a DNA vector from certain promoters (e.g., a T7 promoter) to produce a precursor RNA, it is understood that the 5′ end of the precursor RNA is G. To reduce the immunogenicity of a circular RNA composition that contains a low level of contaminant linear mRNA, an excess of GMP relative to GTP can be provided during transcription such that most transcripts contain a 5′ GMP, which cannot be capped. Therefore, in some embodiments, transcription is carried out in the presence of an excess of GMP. In some embodiments, transcription is carried out where the ratio of GMP concentration to GTP concentration is within the range of about 3:1 to about 15:1, for example, about 3:1 to about 10:1, about 3:1 to about 5:1, about 3:1, about 4:1, or about 5:1.

[0411] In some embodiments, a composition comprising circular RNA has been purified. Circular RNA may be purified by any known method commonly used in the art, such as column chromatography, gel filtration chromatography, and size exclusion chromatography. In some embodiments, purification comprises one or more of the following steps: phosphatase treatment, HPLC size exclusion purification, and RNase R digestion. In some embodiments, purification comprises the following steps in order: RNase R digestion, phosphatase treatment, and HPLC size exclusion purification. In some embodiments, purification comprises reverse phase HPLC. In some embodiments, a purified composition contains less double stranded RNA, DNA splints, triphosphorylated RNA, phosphatase proteins, protein ligases, capping enzymes and/or nicked RNA than unpurified RNA. In some embodiments, a purified composition is less immunogenic than an unpurified composition. In some embodiments, immune cells exposed to a purified composition produce less IFN-β1, RIG-I, IL-2, IL-6, IFNγ, and/or TNFα than immune cells exposed to an unpurified composition.

### 5. Ionizable Lipids

[0412] In certain embodiments disclosed herein are ionizable lipids that may be used as a component of a transfer vehicle to facilitate or enhance the delivery and release of circular RNA to one or more target cells (e.g., by permeating or fusing with the lipid membranes of such target cells). In certain embodiments, an ionizable lipid comprises one or more cleavable functional groups (e.g., a disulfide) that allow, for example, a hydrophilic functional head-group to dissociate from a lipophilic functional tail-group of the compound (e.g., upon exposure to oxidative, reducing or acidic conditions), thereby facilitating a phase transition in the lipid bilayer of the one or more target cells.

[0413] In some embodiments, an ionizable lipid is a lipid as described in international patent application PCT/US2018/058555.

[0414] In some of embodiments, a cationic lipid has the following formula:

[chemical structure]

wherein:

[0415] R₁ and R₂ are either the same or different and independently optionally substituted C10-C24 alkyl, optionally substituted C₁₀-C₂₄ alkenyl, optionally substituted C₁₀-C₂₄ alkynyl, or optionally substituted C10-C24 acyl;

[0416] R₃ and R₄ are either the same or different and independently optionally substituted C₁-C₆alkyl, optionally substituted C2-C6 alkenyl, or optionally substituted C2-C6 alkynyl or R₃ and R4 may join to form an optionally substituted heterocyclic ring of 4 to 6 carbon atoms and 1 or 2 heteroatoms chosen from nitrogen and oxygen;

[0417] R₅ is either absent or present and when present is hydrogen or C₁-C₆ alkyl; m, n, and p are either the same or different and independently either 0 or 1 with the proviso that m, n, and p are not simultaneously 0; q is 0, 1, 2, 3, or 4; and

[0418] Y and Z are either the same or different and independently O, S, or NH.

[0419] In one embodiment, R₁ and R₂ are each linoleyl, and the amino lipid is a dilinoleyl amino lipid.

[0420] In one embodiment, the amino lipid is a dilinoleyl amino lipid.

[0421] In various other embodiments, a cationic lipid has the following structure:

[chemical structure]

or a pharmaceutically acceptable salt, tautomer, prodrug or stereoisomer thereof, wherein:

[0422] R₁ and R₂ are each independently selected from the group consisting of H and C₁-C₃ alkyls; and

[0423] R₃ and R4 are each independently an alkyl group having from about 10 to about 20 carbon atoms, wherein at least one of R₃ and R4 comprises at least two sites of unsaturation.

[0424] In some embodiments, R₃ and R4 are each independently selected from dodecadienyl, tetradecadienyl, hexadecadienyl, linoleyl, and icosadienyl. In an embodiment, R₃ and R4 and are both linoleyl. In some embodiments, R₃ and/or R4 may comprise at least three sites of unsaturation (e.g., R₃ and/or R4 may be, for example, dodecatrienyl, tetradectrienyl, hexadecatrienyl, linolenyl, and icosatrienyl).

[0425] In some embodiments, a cationic lipid has the following structure:

[chemical structure]

or a pharmaceutically acceptable salt, tautomer, prodrug or stereoisomer thereof, wherein:

[0426] R₁ and R₂ are each independently selected from H and C₁-C₃ alkyls;

[0427] R₃ and R4 are each independently an alkyl group having from about 10 to about 20 carbon atoms, wherein at least one of R₃ and R4 comprises at least two sites of unsaturation.

[0428] In one embodiment, R₃ and R4 are the same, for example, in some embodiments R₃ and R4 are both linoleyl (C₁₈-alkyl). In another embodiment, R₃ and R4 are different, for example, in some embodiments, R₃ is tetradectrienyl (C₁₄-alkyl) and R₄ is linoleyl (Cᵢₛ-alkyl). In a preferred embodiment, the cationic lipid(s) of the present invention are symmetrical, i.e., R₃ and R₄ are the same. In another preferred embodiment, both R₃ and R₄ comprise at least two sites of unsaturation. In some embodiments, R₃ and R4 are each independently selected from dodecadienyl, tetradecadienyl, hexadecadienyl, linoleyl, and icosadienyl. In an embodiment, R₃ and R4 are both linoleyl. In some embodiments, R₃ and/or R4 comprise at least three sites of unsaturation and are each independently selected from dodecatrienyl, tetradectrienyl, hexadecatrienyl, linolenyl, and icosatrienyl.

[0429] In various embodiments, a cationic lipid has the formula:

[chemical structure]

or a pharmaceutically acceptable salt, tautomer, prodrug or stereoisomer thereof, wherein:

[0430] Xₐₐ is a D- or L-amino acid residue having the formula —NR^{N}—CR¹R²—C(C═O)—, or a peptide or a peptide of amino acid residues having the formula —{NR^{N}—CR¹R²—C(C═O)}ₙ—, wherein n is an integer from 2 to 20;

[0431] R¹ is independently, for each occurrence, a non-hydrogen or a substituted or unsubstituted side chain of an amino acid;

[0432] R² and R^{N} are independently, for each occurrence, hydrogen, an organic group consisting of carbon, oxygen, nitrogen, sulfur, and hydrogen atoms, or any combination of the foregoing, and having from 1 to 20 carbon atoms, C₍₁₋₅₎alkyl, cycloalkyl, cycloalkylalkyl, C₍₁₋₅₎alkenyl, C₍₁₋₅₎alkynyl, C₍₁₋₅₎alkanoyl, C₍₁₋₅₎alkanoyloxy, C₍₁₋₅₎alkoxy, C₍₁₋₅₎alkoxy-C₍₁₋₅₎alkyl, C₍₁₋₅₎alkoxy-C₍₁₋₅₎alkoxy, C₍₁₋₅₎alkyl-amino-C₍₁₋₅₎alkyl-, C₍₁₋₅₎dialkyl-amino-C₍₁₋₅₎alkyl-, nitro-C₍₁₋₅₎alkyl, cyano-C₍₁₋₅₎alkyl, aryl-C₍₁₋₅₎alkyl, 4-biphenyl-C₍₁₋₅₎alkyl, carboxyl, or hydroxyl;

[0433] Z is —NH—, —O—, —S—, —CH₂S—, —CH₂S(O)—, or an organic linker consisting of 1-40 atoms selected from hydrogen, carbon, oxygen, nitrogen, and sulfur atoms (preferably, Z is —NH— or —O—);

[0434] R^{x} and R^{y} are, independently, (i) a lipophilic tail derived from a lipid (which can be naturally occurring or synthetic), e.g., a phospholipid, a glycolipid, a triacylglycerol, a glycerophospholipid, a sphingolipid, a ceramide, a sphingomyelin, a cerebroside, or a ganglioside, wherein the tail optionally includes a steroid; (ii) an amino acid terminal group selected from hydrogen, hydroxyl, amino, and an organic protecting group; or (iii) a substituted or unsubstituted C₍₃₋₂₂₎alkyl, C₍₆₋₁₂₎cycloalkyl, C₍₆₋₁₂₎cycloalkyl-C₍₃₋₂₂₎alkyl, C₍₃₋₂₂₎alkenyl, C₍₃₋₂₂₎alkynyl, C₍₃₋₂₂₎alkoxy, or C₍₆₋₁₂₎-alkoxy C₍₃₋₂₂₎alkyl;

[0435] In some embodiments, one of R^{x} and R^{y} is a lipophilic tail as defined above and the other is an amino acid terminal group. In some embodiments, both R and R^{y} are lipophilic tails.

[0436] In some embodiments, at least one of R^{x} and R^{y} is interrupted by one or more biodegradable groups (e.g., —OC(O)—, —C(O)O—, —SC(O)—, —C(O)S—, —OC(S)—, —C(S)O—, —S—S—, —C(O)(NR⁵)—, —N(R⁵)C(O)—, —C(S)(NR⁵)—, —N(R⁵)C(O)—, —N(R⁵)C(O)N(R⁵)—, —OC(O)O—, —OSi(R⁵)₂O—, —C(O)(CR³R⁴)C(O)O—, —OC(O)(CR³R⁴)C(O)—, or

[chemical structure]

[0437] In some embodiments, R¹¹ is a C₂-C₈alkyl or alkenyl.

[0438] In some embodiments, each occurrence of R⁵ is, independently, H or alkyl.

[0439] In some embodiments, each occurrence of R³ and R⁴ are, independently H, halogen, OH, alkyl, alkoxy, —NH₂, alkylamino, or dialkylamino; or R₃ and R₄, together with the carbon atom to which they are directly attached, form a cycloalkyl group. In some particular embodiments, each occurrence of R³ and R⁴ are, independently H or C₁-C₄alkyl.

[0440] In some embodiments, R^{x} and R^{y} each, independently, have one or more carbon-carbon double bonds.

[0441] In some embodiments, the cationic lipid is one of the following:

[chemical structure]

or a pharmaceutically acceptable salt, tautomer, prodrug or stereoisomer thereof, wherein:

[0442] R₁ and R₂ are each independently alkyl, alkenyl, or alkynyl, each of which can optionally substituted;

[0443] R₃ and R₄ are each independently a C₁-C₆ alkyl, or R₃ and R₄ are taken together to form an optionally substituted heterocyclic ring.

[0444] A representative useful dilinoleyl amino lipid has the formula:

[chemical structure]

wherein n is 0, 1, 2, 3, or 4.

[0445] In one embodiment, a cationic lipid is DLin-K-DMA. In one embodiment, a cationic lipid is DLin-KC2-DMA (DLin-K-DMA above, wherein n is 2).

[0446] In one embodiment, a cationic lipid has the following structure:

[chemical structure]

or a pharmaceutically acceptable salt, tautomer, prodrug or stereoisomer thereof, wherein:

[0447] R₁ and R₂ are each independently for each occurrence optionally substituted C₁₀-C₃₀ alkyl, optionally substituted C₁₀-C₃₀ alkenyl, optionally substituted C₁₀-C₃₀ alkynyl or optionally substituted C₁₀-C₃₀ acyl;

[0448] R₃ is H, optionally substituted C₂-C₁₀ alkyl, optionally substituted C₂-C₁₀ alkenyl, optionally substituted C₂-C₁₀ alkylyl, alkylhetrocycle, alkylpbosphate, alkylphosphorothioate, alkylphosphorodithioate, alkylphosphonate, alkylamine, hydroxyalkyl, ω-aminoalkyl, ω-(substituted)aminoalkyl, ω-phosphoalkyl, ω-thiophosphoalkyl, optionally substituted polyethylene glycol (PEG, mw 100-40K), optionally substituted mPEG (mw 120-40K), heteroaryl, or heterocycle, or a linker ligand, for example, in some embodiments, R₃ is (CH₃)₂N(CH₂)ₙ—, wherein n is 1, 2, 3 or 4;

[0449] E is O, S, N(Q), C(O, OC(O), C(O)O, N(Q)C(O), C(O)N(Q), (Q)N(CO)O, O(CO)N(Q), S(O), NS(O)₂N(Q), S(O)₂, N(Q)S(O)₂, SS, O═N, aryl, heteroaryl, cyclic or heterocycle, for example —C(O)O, wherein - is a point of connection to R₃; and

[0450] Q is H, alkyl, ω-aminoalkyl ω-(substituted)aminoalkyl, ω-phosphoalkyl or ω-thiophosphoalkyl.

[0451] In one specific embodiment, the cationic lipid of Embodiments 1, 2, 3, 4 or 5 has the following structure:

[chemical structure]

or a pharmaceutically acceptable salt, tautomer, prodrug or stereoisomer thereof, wherein:

[0452] E is O, S, N(Q), C(O), N(Q)C(O), C(O)N(Q), (Q)N(CO)O, O(CO)N(Q), S(O), NS(O)₂N(Q), S(O)₂, N(Q)S(O)₂, SS, O═N, aryl, heteroaryl, cyclic or heterocycle;

[0453] Q is H, alkyl, ω-amninoalkyl, ω-(substituted)amninoalky, ω-phosphoalkyl or ω-thiophosphoalkyl;

[0454] R₁ and R₂ and Rₓ are each independently for each occurrence H, optionally substituted C₁-C₁₀ alkyl, optionally substituted C₁₀-C₃₀ alkyl, optionally substituted C₁₀-C₃₀ alkenyl, optionally substituted C₁-C₃₀ alkynyl, optionally substituted C₁₀-C₃₀ acyl, or linker-ligand, provided that at least one of R₁, R₂ and Rₓ is not H;

[0455] R₃ is H, optionally substituted C₁-C₁₀ alkyl, optionally substituted C₂-C₁₀ alkenyl, optionally substituted C₂-C₁₀alkynyl, alkylhetrocycle, alkylphosphate, alkylphosphorothioate, alkylphosphorodithioate, alkylphosphonate, alkylamine, hydroxyalkyl, ω-aminoalkyl, ω-(substituted)aminoalkyl, ω-phosphoalkyl, ω-thiophosphoalkyl, optionally substituted polyethylene glycol (PEG, mw 100-40K), optionally substituted mPEG (mw 120-40K), heteroaryl, or heterocycle, or linker-ligand; and

[0456] n is 0, 1, 2, or 3

[0457] In one embodiment, the cationic lipid of Embodiments 1, 2, 3, 4 or 5 has the structure of Formula I:

[chemical structure]

or a pharmaceutically acceptable salt, tautomer, prodrug or stereoisomer thereof, wherein:

[0458] one of L¹ or L² is —O(C═O)—, —(C═O)O—, —C(═O)—, —O—, —S(O)ₓ—, —S—S—, —C(═O)S—, SC(═O)—, —NR^{a}C(═O)—, —C(═O)NR^{a}—, NR^{a}C(═O)NR^{a}—, —OC(═O)NR^{a}— or —NR^{a}C(═O)O—, and the other of L¹ or L² is —O(C═O)—, —(C═O)O—, —C(═O)—, —O—, —S(O)ₓ—, —S—S—, —C(═O)S—, SC(═O)—, —NR^{a}C(═O)—, —C(═O)NR^{a}—, NR^{a}C(═O)NR^{a}—, —OC(═O)NR^{a}—

or
—NR^{a}C(═O)O— or a direct bond;

[0459] R^{a} is H or C₁-C₁₂ alkyl;

[0460] R^{1a} and R^{1b} are, at each occurrence, independently either (a) H or C₁-C₁₂ alkyl, or (b) R^{1a} is H or C₁-C₁₂ alkyl, and R^{1b} together with the carbon atom to which it is bound is taken together with an adjacent R^{1b} and the carbon atom to which it is bound to form a carbon-carbon double bond;

[0461] R^{2a} and R^{2b} are, at each occurrence, independently either (a) H or C₁-C₁₂ alkyl, or (b) R^{2a} is H or C₁-C₁₂ alkyl, and R^{2b} together with the carbon atom to which it is bound is taken together with an adjacent R^{2b} and the carbon atom to which it is bound to form a carbon-carbon double bond;

[0462] R^{3a} and R^{3b} are, at each occurrence, independently either (a) H or C₁-C₁₂ alkyl, or (b) R^{3a} is H or C₁-C₁₂ alkyl, and R^{3b} together with the carbon atom to which it is bound is taken together with an adjacent R^{3b} and the carbon atom to which it is bound to form a carbon-carbon double bond;

[0463] R^{4a} and R^{4b} are, at each occurrence, independently either (a) H or C₁-C₁₂ alkyl, or (b) R^{4a} is H or C₁-C₁₂ alkyl, and R^{4b} together with the carbon atom to which it is bound is taken together with an adjacent R^{4b} and the carbon atom to which it is bound to form a carbon-carbon double bond;

[0464] R⁵ and R⁶ are each independently methyl or cycloalkyl;

[0465] R⁷ is, at each occurrence, independently H or C₁-C₁₂ alkyl;

[0466] R⁸ and R⁹ are each independently unsubstituted C₁-C₁₂ alkyl; or R⁸ and R⁹, together with the nitrogen atom to which they are attached, form a 5, 6 or 7-membered heterocyclic ring comprising one nitrogen atom;

[0467] a and d are each independently an integer from 0 to 24;

[0468] b and c are each independently an integer from 1 to 24;

[0469] e is 1 or 2; and

[0470] x is 0, 1 or 2.

[0471] In some embodiments of Formula I, L¹ and L² are independently —O(C═O)— or —(C═O)O—.

[0472] In certain embodiments of Formula I, at least one of R^{1a}, R^{2a}, R^{3a} or R^{4a} is C₁-C₁₂ alkyl, or at least one of L¹ or L² is —O(C═O)— or —(C═O)O—. In other embodiments, R^{1a} and R^{1b} are not isopropyl when a is 6 or n-butyl when a is 8.

[0473] In still further embodiments of Formula I, at least one of R^{1a}, R^{2a}, R^{3a} or R^{4a} is C₁-C₁₂ alkyl, or at least one of L¹ or L² is —O(C═O)— or —(C═O)O—; and

[0474] R^{1a} and R^{1b} are not isopropyl when a is 6 or n-butyl when a is 8.

[0475] In other embodiments of Formula I, R⁸ and R⁹ are each independently unsubstituted C₁-C₁₂ alkyl; or R⁸ and R⁹, together with the nitrogen atom to which they are attached, form a 5, 6 or 7-membered heterocyclic ring comprising one nitrogen atom;

[0476] In certain embodiments of Formula I, any one of L¹ or L² may be —O(C═O)— or a carbon-carbon double bond. L¹ and L² may each be —O(C═O)— or may each be a carbon-carbon double bond.

[0477] In some embodiments of Formula I, one of L¹ or L² is —O(C═O)—. In other embodiments, both L¹ and L² are —O(C═O)—.

[0478] In some embodiments of Formula I, one of L¹ or L² is —(C═O)O—. In other embodiments, both L¹ and L² are —(C═O)O—.

[0479] In some other embodiments of Formula I, one of L¹ or L² is a carbon-carbon double bond. In other embodiments, both L¹ and L² are a carbon-carbon double bond.

[0480] In still other embodiments of Formula I, one of L¹ or L² is —O(C═O)— and the other of L¹ or L² is —(C═O)O—. In more embodiments, one of L¹ or L² is —O(C═O)— and the other of L¹ or L² is a carbon-carbon double bond. In yet more embodiments, one of L¹ or L² is —(C═O)O— and the other of L¹ or L² is a carbon-carbon double bond.

[0481] It is understood that “carbon-carbon” double bond, as used throughout the specification, refers to one of the following structures:

[chemical structure]

wherein R^{a} and R^{b} are, at each occurrence, independently H or a substituent. For example, in some embodiments R^{a} and R^{b} are, at each occurrence, independently H, C₁-C₁₂ alkyl or cycloalkyl, for example H or C₁-C₁₂ alkyl.

[0482] In other embodiments, the lipid compounds of Formula I have the following Formula (Ia):

[chemical structure]

[0483] In other embodiments, the lipid compounds of Formula I have the following Formula (Ib):

[chemical structure]

[0484] In yet other embodiments, the lipid compounds of Formula I have the following Formula (Ic):

[chemical structure]

[0485] In certain embodiments of the lipid compound of Formula I, a, b, c and d are each independently an integer from 2 to 12 or an integer from 4 to 12. In other embodiments, a, b, c and d are each independently an integer from 8 to 12 or 5 to 9. In some certain embodiments, a is 0. In some embodiments, a is 1. In other embodiments, a is 2. In more embodiments, a is 3. In yet other embodiments, a is 4. In some embodiments, a is 5. In other embodiments, a is 6. In more embodiments, a is 7. In yet other embodiments, a is 8. In some embodiments, a is 9. In other embodiments, a is 10. In more embodiments, a is 11. In yet other embodiments, a is 12. In some embodiments, a is 13. In other embodiments, a is 14. In more embodiments, a is 15. In yet other embodiments, a is 16.

[0486] In some other embodiments of Formula I, b is 1. In other embodiments, b is 2. In more embodiments, b is 3. In yet other embodiments, b is 4. In some embodiments, b is 5. In other embodiments, b is 6. In more embodiments, b is 7. In yet other embodiments, b is 8. In some embodiments, b is 9. In other embodiments, b is 10. In more embodiments, b is 11. In yet other embodiments, b is 12. In some embodiments, b is 13. In other embodiments, b is 14. In more embodiments, b is 15. In yet other embodiments, b is 16.

[0487] In some more embodiments of Formula I, c is 1. In other embodiments, c is 2. In more embodiments, c is 3. In yet other embodiments, c is 4. In some embodiments, c is 5. In other embodiments, c is 6. In more embodiments, c is 7. In yet other embodiments, c is 8. In some embodiments, c is 9. In other embodiments, c is 10. In more embodiments, c is 11. In yet other embodiments, c is 12. In some embodiments, c is 13. In other embodiments, c is 14. In more embodiments, c is 15. In yet other embodiments, c is 16.

[0488] In some certain other embodiments of Formula I, d is 0. In some embodiments, d is 1. In other embodiments, d is 2. In more embodiments, d is 3. In yet other embodiments, d is 4. In some embodiments, d is 5. In other embodiments, d is 6. In more embodiments, d is 7. In yet other embodiments, d is 8. In some embodiments, d is 9. In other embodiments, d is 10. In more embodiments, d is 11. In yet other embodiments, d is 12. In some embodiments, d is 13. In other embodiments, d is 14. In more embodiments, d is 15. In yet other embodiments, d is 16.

[0489] In some other various embodiments of Formula I, a and d are the same. In some other embodiments, b and c are the same. In some other specific embodiments, a and d are the same and b and c are the same.

[0490] The sum of a and b and the sum of c and d in Formula I are factors which may be varied to obtain a lipid of formula I having the desired properties. In one embodiment, a and b are chosen such that their sum is an integer ranging from 14 to 24. In other embodiments, c and d are chosen such that their sum is an integer ranging from 14 to 24. In further embodiment, the sum of a and b and the sum of c and d are the same. For example, in some embodiments the sum of a and b and the sum of c and d are both the same integer which may range from 14 to 24. In still more embodiments, a. b, c and d are selected such the sum of a and b and the sum of c and d is 12 or greater.

[0491] In some embodiments of Formula I, e is 1. In other embodiments, e is 2.

[0492] The substituents at R^{1a}, R^{2a}, R^{3a} and R^{4a} of Formula I are not particularly limited. In certain embodiments R^{1a}, R^{2a}, R^{3a} and R^{4a} are H at each occurrence. In certain other embodiments at least one of R^{1a}, R^{2a}, R^{3a} and R^{4a} is C₁-C₁₂ alkyl. In certain other embodiments at least one of R^{1a}, R^{2a}, R^{3a} and R^{4a} is C₁-C₈ alkyl. In certain other embodiments at least one of R^{1a}, R^{2a}, R^{3a} and R^{4a} is C₁-C₆ alkyl. In some of the foregoing embodiments, the C₁-C₈ alkyl is methyl, ethyl, n-propyl, iso-propyl, n-butyl, iso-butyl, tert-butyl, n-hexyl or n-octyl.

[0493] In certain embodiments of Formula I, R^{1a}, R^{1b}, R^{4a} and R^{4b} are C₁-C₁₂ alkyl at each occurrence.

[0494] In further embodiments of Formula I, at least one of R^{1b}, R^{2b}, R^{3b} and R^{4b} is H or R^{1b}, R^{2b}, R^{3b} and R^{4b} are H at each occurrence.

[0495] In certain embodiments of Formula I, R^{1b} together with the carbon atom to which it is bound is taken together with an adjacent R^{1b} and the carbon atom to which it is bound to form a carbon-carbon double bond. In other embodiments of the foregoing R^{4b} together with the carbon atom to which it is bound is taken together with an adjacent R^{4b} and the carbon atom to which it is bound to form a carbon-carbon double bond.

[0496] The substituents at R⁵ and R⁶ of Formula I are not particularly limited in the foregoing embodiments. In certain embodiments one or both of R⁵ or R⁶ is methyl. In certain other embodiments one or both of R⁵ or R⁶ is cycloalkyl for example cyclohexyl. In these embodiments the cycloalkyl may be substituted or not substituted. In certain other embodiments the cycloalkyl is substituted with C₁-C₁₂ alkyl, for example tert-butyl.

[0497] The substituents at R⁷ are not particularly limited in the foregoing embodiments of Formula I. In certain embodiments at least one R⁷ is H. In some other embodiments, R⁷ is H at each occurrence. In certain other embodiments R⁷ is C₁-C₁₂ alkyl.

[0498] In certain other of the foregoing embodiments of Formula I, one of R⁸ or R⁹ is methyl. In other embodiments, both R⁸ and R⁹ are methyl.

[0499] In some different embodiments of Formula I, R⁸ and R⁹, together with the nitrogen atom to which they are attached, form a 5, 6 or 7-membered heterocyclic ring. In some embodiments of the foregoing, R⁸ and R⁹, together with the nitrogen atom to which they are attached, form a 5-membered heterocyclic ring, for example a pyrrolidinyl ring.

[0500] In some embodiments of Embodiment 3, the first and second cationic lipids are each, independently selected from a lipid of Formula I.

[0501] In various different embodiments, the lipid of Formula I has one of the structures set forth in Table 1 below.

TABLE 1
Representative Lipids of Formula I

| No. | Structure | pKa |
|---|---|---|
| I-1 | [chemical structure] | — |
| I-2 | [chemical structure] | 5.64 |
| I-3 | [chemical structure] | 7.15 |
| I-4 | [chemical structure] | 6.43 |
| I-5 | [chemical structure] | 6.28 |
| I-6 | [chemical structure] | 6.12 |
| I-7 | [chemical structure] | — |
| I-8 | [chemical structure] | — |
| I-9 | [chemical structure] | — |
| I-10 | [chemical structure] | — |
| I-11 | [chemical structure] | 6.36 |
| I-12 | [chemical structure] | — |
| I-13 | [chemical structure] | 6.51 |
| I-14 | [chemical structure] | — |
| I-15 | [chemical structure] | 6.30 |
| I-16 | [chemical structure] | 6.63 |
| I-17 | [chemical structure] | — |
| I-18 | [chemical structure] | — |
| I-19 | [chemical structure] | 6.72 |
| I-20 | [chemical structure] | 6.44 |
| I-21 | [chemical structure] | 6.28 |
| I-22 | [chemical structure] | 6.53 |
| I-23 | [chemical structure] | 6.24 |
| I-24 | [chemical structure] | 6.28 |
| I-25 | [chemical structure] | 6.20 |
| I-33 | [chemical structure] | 6.27 |
| I-34 | [chemical structure] | — |
| I-35 | [chemical structure] | 6.21 |
| I-36 | [chemical structure] | — |
| I-37 | [chemical structure] | — |
| I-38 | [chemical structure] | 6.24 |
| I-39 | [chemical structure] | 5.82 |
| I-40 | [chemical structure] | 6.38 |
| I-41 | [chemical structure] | 5.91 |

[0502] In some embodiments, the cationic lipid of Embodiments 1, 2, 3, 4 or 5 has a structure of Formula II:

[chemical structure]

or a pharmaceutically acceptable salt, tautomer, prodrug or stereoisomer thereof, wherein:

[0503] one of L¹ or L² is —O(C═O)—, —(C═O)O—, —C(═O)—, —O—, —S(O)ₓ—, —S—S—, —C(═O)S—, SC(═O)—, —NR^{a}C(═O)—, —C(═O)NR^{a}—, NR^{a}C(═O)NR^{a}—, —OC(═O)NR^{a}— or —NR^{a}C(═O)O—, and the other of L¹ or L² is —O(C═O)—, —(C═O)O—, —C(═O)—, —O—, —S(O)ₓ—, —S—S—, —C(═O)S—, SC(═O)—, —NR^{a}C(═O)—, —C(═O)NR^{a}—, NR^{a}C(═O)NR^{a}—, —OC(═O)NR^{a}—

or
—NR^{a}C(═O)O— or a direct bond;

[0504] G¹ is C₁-C₂ alkylene, —(C═O)—, —O(C═O)—, —SC(═O)—, —NR^{a}C(═O)— or a direct bond;

[0505] G² is —C(═O)—, —(C═O)O—, —C(═O)S—, —C(═O)NR^{a}— or a direct bond;

[0506] G³ is C₁-C₆ alkylene;

[0507] R^{a} is H or C₁-C₁₂ alkyl;

[0508] R^{1a} and R^{1b} are, at each occurrence, independently either: (a) H or C₁-C₁₂ alkyl; or (b) R^{1a} is H or C₁-C₁₂ alkyl, and R^{1b} together with the carbon atom to which it is bound is taken together with an adjacent R^{1b} and the carbon atom to which it is bound to form a carbon-carbon double bond;

[0509] R^{2a} and R^{2b} are, at each occurrence, independently either: (a) H or C₁-C₁₂ alkyl; or (b) R^{2a} is H or C₁-C₁₂ alkyl, and R^{2b} together with the carbon atom to which it is bound is taken together with an adjacent R^{2b} and the carbon atom to which it is bound to form a carbon-carbon double bond;

[0510] R^{3a} and R^{3b} are, at each occurrence, independently either (a): H or C₁-C₂ alkyl; or (b) R^{3a} is H or C₁-C₁₂ alkyl, and R^{3b} together with the carbon atom to which it is bound is taken together with an adjacent R^{3b} and the carbon atom to which it is bound to form a carbon-carbon double bond;

[0511] R^{4a} and R^{4b} are, at each occurrence, independently either: (a) H or C₁-C₁₂ alkyl; or (b) R^{4a} is H or C₁-C₁₂ alkyl, and R^{4b} together with the carbon atom to which it is bound is taken together with an adjacent R^{4b} and the carbon atom to which it is bound to form a carbon-carbon double bond;

[0512] R⁵ and R⁶ are each independently H or methyl;

[0513] R⁷ is C₄-C₂₀ alkyl;

[0514] R⁸ and R⁹ are each independently C₁-C₁₂ alkyl; or R⁸ and R⁹, together with the nitrogen atom to which they are attached, forma 5, 6 or 7-membered heterocyclic ring;

[0515] a, b, c and d are each independently an integer from 1 to 24; and

[0516] x is 0, 1 or 2.

[0517] In some embodiments of Formula (II), L¹ and L² are each independently —O(C═O)—, —(C═O)O— or a direct bond. In other embodiments, G¹ and G² are each independently —(C═O)— or a direct bond. In some different embodiments, L¹ and L² are each independently —O(C═O)—, —(C═O)O— or a direct bond; and G¹ and G² are each independently —(C═O)— or a direct bond.

[0518] In some different embodiments of Formula (II), L¹ and L² are each independently —C(═O)—, —O—, —S(O)ₓ—, —S—S—, —C(═O)S—, —SC(═O)—, —NR^{a}—, —NR^{a}C(═O)—, —C(═O)NR^{a}—, —NR^{a}C(═O)NR^{a}, —OC(═O)NR^{a}—, —NR^{a}C(═O)O—, —NR^{a}S(O)ₓNR^{a}—, —NR^{a}S(O)ₓ or —S(O)ₓNR^{a}—.

[0519] In other of the foregoing embodiments of Formula (II), the lipid compound has one of the following Formulae (IIA) or (IIB):

[chemical structure]

[0520] In some embodiments of Formula (II), the lipid compound has Formula (IIA). In other embodiments, the lipid compound has Formula (IIB).

[0521] In any of the foregoing embodiments of Formula (II), one of L¹ or L² is —O(C═O)—. For example, in some embodiments each of L¹ and L² are —O(C═O)—.

[0522] In some different embodiments of Formula (II), one of L¹ or L² is —(C═O)O—. For example, in some embodiments each of L¹ and L² is —(C═O)O—.

[0523] In different embodiments of Formula (II), one of L¹ or L² is a direct bond. As used herein, a “direct bond” means the group (e.g., L¹ or L²) is absent. For example, in some embodiments each of L¹ and L² is a direct bond.

[0524] In other different embodiments of Formula (II), for at least one occurrence of R^{1a} and R^{1b}, R^{1a} is H or C₁-C₁₂ alkyl, and R^{1b} together with the carbon atom to which it is bound is taken together with an adjacent R^{1b} and the carbon atom to which it is bound to form a carbon-carbon double bond.

[0525] In still other different embodiments of Formula (II), for at least one occurrence of R^{4a} and R^{4b}, R^{4a} is H or C₁-C₁₂ alkyl, and R^{4b} together with the carbon atom to which it is bound is taken together with an adjacent R^{4b} and the carbon atom to which it is bound to form a carbon-carbon double bond.

[0526] In more embodiments of Formula (II), for at least one occurrence of R^{2a} and R^{2b}, R^{2a}, is H or C₁-C₁₂ alkyl, and R^{2b} together with the carbon atom to which it is bound is taken together with an adjacent R^{2b} and the carbon atom to which it is bound to form a carbon-carbon double bond.

[0527] In other different embodiments of Formula (II), for at least one occurrence of R^{3a} and R^{3b}, R^{3a} is H or C₁-C₁₂ alkyl, and R^{3b} together with the carbon atom to which it is bound is taken together with an adjacent R^{3b} and the carbon atom to which it is bound to form a carbon-carbon double bond.

[0528] In various other embodiments of Formula (II), the lipid compound has one of the following Formulae (IIC) or (HD).

[chemical structure]

wherein e, f, g and h are each independently an integer from 1 to 12.

[0529] In some embodiments of Formula (II), the lipid compound has Formula (IIC). In other embodiments, the lipid compound has Formula (IID).

[0530] In various embodiments of Formulae (IIC) or (IID), e, f, g and h are each independently an integer from 4 to 10.

[0531] In certain embodiments of Formula (II), a, b, c and d are each independently an integer from 2 to 12 or an integer from 4 to 12. In other embodiments, a, b, c and d are each independently an integer from 8 to 12 or 5 to 9. In some certain embodiments, a is 0. In some embodiments, a is 1. In other embodiments, a is 2. In more embodiments, a is 3. In yet other embodiments, a is 4. In some embodiments, a is 5. In other embodiments, a is 6. In more embodiments, a is 7. In yet other embodiments, a is 8. In some embodiments, a is 9. In other embodiments, a is 10. In more embodiments, a is 11. In yet other embodiments, a is 12. In some embodiments, a is 13. In other embodiments, a is 14. In more embodiments, a is 15. In yet other embodiments, a is 16.

[0532] In some embodiments of Formula (II), b is 1. In other embodiments, b is 2. In more embodiments, b is 3. In yet other embodiments, b is 4. In some embodiments, b is 5. In other embodiments, b is 6. In more embodiments, b is 7. In yet other embodiments, b is 8. In some embodiments, b is 9. In other embodiments, b is 10. In more embodiments, b is 11. In yet other embodiments, b is 12. In some embodiments, b is 13. In other embodiments, b is 14. In more embodiments, b is 15. In yet other embodiments, b is 16.

[0533] In some embodiments of Formula (II), c is 1. In other embodiments, c is 2. In more embodiments, c is 3. In yet other embodiments, c is 4. In some embodiments, c is 5. In other embodiments, c is 6. In more embodiments, c is 7. In yet other embodiments, c is 8. In some embodiments, c is 9. In other embodiments, c is 10. In more embodiments, c is 11. In yet other embodiments, c is 12. In some embodiments, c is 13. In other embodiments, c is 14. In more embodiments, c is 15. In yet other embodiments, c is 16.

[0534] In some certain embodiments of Formula (II), d is 0. In some embodiments, d is 1. In other embodiments, d is 2. In more embodiments, d is 3. In yet other embodiments, d is 4. In some embodiments, d is 5. In other embodiments, d is 6. In more embodiments, d is 7. In yet other embodiments, d is 8. In some embodiments, d is 9. In other embodiments, d is 10. In more embodiments, d is 11. In yet other embodiments, d is 12. In some embodiments, d is 13. In other embodiments, d is 14. In more embodiments, d is 15. In yet other embodiments, d is 16.

[0535] In some embodiments of Formula (II), e is 1. In other embodiments, e is 2. In more embodiments, e is 3. In yet other embodiments, e is 4. In some embodiments, e is 5. In other embodiments, e is 6. In more embodiments, e is 7. In yet other embodiments, e is 8. In some embodiments, e is 9. In other embodiments, e is 10. In more embodiments, e is 11. In yet other embodiments, e is 12.

[0536] In some embodiments of Formula (II), f is 1. In other embodiments, f is 2. In more embodiments, f is 3. In yet other embodiments, f is 4. In some embodiments, f is 5. In other embodiments, f is 6. In more embodiments, f is 7. In yet other embodiments, f is 8. In some embodiments, f is 9. In other embodiments, f is 10. In more embodiments, f is 11. In yet other embodiments, f is 12.

[0537] In some embodiments of Formula (II), g is 1. In other embodiments, g is 2. In more embodiments, g is 3. In yet other embodiments, g is 4. In some embodiments, g is 5. In other embodiments, g is 6. In more embodiments, g is 7. In yet other embodiments, g is 8. In some embodiments, g is 9. In other embodiments, g is 10. In more embodiments, g is 11. In yet other embodiments, g is 12.

[0538] In some embodiments of Formula (II), his 1. In other embodiments, e is 2. In more embodiments, h is 3. In yet other embodiments, h is 4. In some embodiments, e is 5. In other embodiments, h is 6. In more embodiments, h is 7. In yet other embodiments, h is 8. In some embodiments, h is 9. In other embodiments, h is 10. In more embodiments, his 11. In yet other embodiments, his 12.

[0539] In some other various embodiments of Formula (II), a and d are the same. In some other embodiments, b and c are the same. In some other specific embodiments and a and d are the same and b and c are the same.

[0540] The sum of a and b and the sum of c and d of Formula (II) are factors which may be varied to obtain a lipid having the desired properties. In one embodiment, a and b are chosen such that their sum is an integer ranging from 14 to 24. In other embodiments, c and d are chosen such that their sum is an integer ranging from 14 to 24. In further embodiment, the sum of a and b and the sum of c and d are the same. For example, in some embodiments the sum of a and b and the sum of c and d are both the same integer which may range from 14 to 24. In still more embodiments, a. b, c and d are selected such that the sum of a and b and the sum of c and d is 12 or greater.

[0541] The substituents at R^{1a}, R^{2a}, R^{3a} and R^{4a} of Formula (II) are not particularly limited. In some embodiments, at least one of R^{1a}, R^{2a}, R^{3a} and R^{4a} is H. In certain embodiments R^{1a}, R^{2a}, R^{3a} and R^{4a} are H at each occurrence. In certain other embodiments at least one of R^{1a}, R^{2a}, R^{3a} and R^{4a} is C₁-C₁₂ alkyl. In certain other embodiments at least one of R^{1a}, R^{2a}, R^{3a} and R^{4a} is C₁-C₈ alkyl. In certain other embodiments at least one of R^{1a}, R^{2a}, R^{3a} and R^{4a} is C₁-C₆ alkyl. In some of the foregoing embodiments, the C₁-C₈ alkyl is methyl, ethyl, n-propyl, iso-propyl, n-butyl, iso-butyl, tert-butyl, n-hexyl or n-octyl.

[0542] In certain embodiments of Formula (II), R^{1a}, R^{1b}, R^{4a} and R^{4b} are C₁-C₁ alkyl at each occurrence.

[0543] In further embodiments of Formula (II), at least one of R^{1b}, R^{2b}, R^{3b} and R^{4b} is H or R^{1b}, R^{2b}, R^{3b} and R^{4b} are H at each occurrence.

[0544] In certain embodiments of Formula (II), R^{1b} together with the carbon atom to which it is bound is taken together with an adjacent R^{1b} and the carbon atom to which it is bound to form a carbon-carbon double bond. In other embodiments of the foregoing R^{4b} together with the carbon atom to which it is bound is taken together with an adjacent R^{4b} and the carbon atom to which it is bound to form a carbon-carbon double bond.

[0545] The substituents at R⁵ and R⁶ of Formula (II) are not particularly limited in the foregoing embodiments. In certain embodiments one of R⁵ or R⁶ is methyl. In other embodiments each of R⁵ or R⁶ is methyl.

[0546] The substituents at R⁷ of Formula (II) are not particularly limited in the foregoing embodiments. In certain embodiments R⁷ is C₆-C₁₆ alkyl. In some other embodiments, R⁷ is C₆-C₉ alkyl. In some of these embodiments, R⁷ is substituted with —(C═O)OR^{b}, —O(C═O)R^{b}, —C(═O)R^{b}, —OR^{b}, —S(O)ₓR^{b}, —S—SR^{b}, —C(═O)SR^{b}, —SC(═O)R^{b}, —NR^{a}R^{b}, —NR^{a}C(═O)R^{b}, —C(═O)NR^{a}R^{b}, —NR^{a}C(═O)NR^{a}R^{b}, —OC(═O)NR^{a}R^{b}, —NR^{a}C(═O)OR^{b}, —NR^{a}S(O)ₓNR^{a}R^{b}, —NR^{a}S(O)ₓR^{b} or —S(O)ₓNR^{a}R^{b}, wherein: R^{a} is H or C₁-C₁₂ alkyl; R^{b} is C₁-C₁₅ alkyl; and x is 0, 1 or 2. For example, in some embodiments R⁷ is substituted with —(C═O)OR^{b} or —O(C═O)R^{b}.

[0547] In some of the foregoing embodiments of Formula (II), R^{b} is branched C₁-C₁₆ alkyl. For example, in some embodiments R^{b} has one of the following structures:

[chemical structure]

[0548] In certain other of the foregoing embodiments of Formula (II), one of R⁸ or R⁹ is methyl. In other embodiments, both R¹ and R⁹ are methyl.

[0549] In some different embodiments of Formula (II), R⁸ and R⁹, together with the nitrogen atom to which they are attached, form a 5, 6 or 7-membered heterocyclic ring. In some embodiments of the foregoing, R⁸ and R⁹, together with the nitrogen atom to which they are attached, form a 5-membered heterocyclic ring, for example a pyrrolidinyl ring. In some different embodiments of the foregoing, R⁸ and R⁹, together with the nitrogen atom to which they are attached, form a 6-membered heterocyclic ring, for example a piperazinyl ring.

[0550] In certain embodiments of Embodiment 3, the first and second cationic lipids are each, independently selected from a lipid of Formula II.

[0551] In still other embodiments of the foregoing lipids of Formula (II), G³ is C₂-C₄ alkylene, for example C₃ alkylene. In various different embodiments, the lipid compound has one of the structures set forth in Table 2 below

TABLE 2
Representative Lipids of Formula (II)

| No. | Structure | pKa |
|---|---|---|
| II-1 | [chemical structure] | 5.64 |
| II-2 | [chemical structure] | — |
| II-3 | [chemical structure] | — |
| II-4 | [chemical structure] | — |
| II-5 | [chemical structure] | 6.27 |
| II-6 | [chemical structure] | 6.14 |
| II-7 | [chemical structure] | 5.93 |
| II-8 | [chemical structure] | 5.35 |
| II-9 | [chemical structure] | 6.27 |
| II-10 | [chemical structure] | 6.16 |
| II-11 | [chemical structure] | 6.13 |
| II-12 | [chemical structure] | 6.21 |
| II-13 | [chemical structure] | 6.22 |
| II-14 | [chemical structure] | 6.33 |
| II-15 | [chemical structure] | 6.32 |
| II-16 | [chemical structure] | 6.37 |
| II-17 | [chemical structure] | 6.27 |
| II-18 | [chemical structure] | — |
| II-19 | [chemical structure] | — |
| II-20 | [chemical structure] | — |
| II-21 | [chemical structure] | — |
| II-22 | [chemical structure] | — |
| II-23 | [chemical structure] | — |
| II-24 | [chemical structure] | 6.14 |
| II-25 | [chemical structure] | — |
| II-26 | [chemical structure] | — |
| II-27 | [chemical structure] | — |
| II-28 | [chemical structure] | — |
| II-29 | [chemical structure] | — |
| II-30 | [chemical structure] | — |
| II-31 | [chemical structure] | — |
| II-32 | [chemical structure] | — |
| II-33 | [chemical structure] | — |
| II-34 | [chemical structure] | — |
| II-35 | [chemical structure] | 5.97 |
| II-36 | [chemical structure] | 6.13 |
| II-37 | [chemical structure] | 5.61 |
| II-38 | [chemical structure] | 6.45 |
| II-39 | [chemical structure] | 6.45 |
| II-40 | [chemical structure] | 6.57 |
| II-41 | [chemical structure] | — |
| II-42 | [chemical structure] | — |
| II-43 | [chemical structure] | — |
| II-44 | [chemical structure] | — |
| II-45 | [chemical structure] | — |
| II-46 | [chemical structure] | — |

[0552] In some other embodiments, the cationic lipid of Embodiments 1, 2, 3, 4 or 5 has a structure of Formula III:

[chemical structure]

or a pharmaceutically acceptable salt, prodrug or stereoisomer thereof, wherein:

[0553] one of L¹ or L² is —O(C═O)—, —(C═O)O—, —C(═O)—, —O—, —S(O)ₓ—, —S—S—, —C(═O)S—, SC(═O)—, —NR^{a}C(═O)—, —C(═O)NR^{a}—, NR^{a}C(═O)NR^{a}—, —OC(═O)NR^{a}— or —NR^{a}C(═O)O—, and the other of L¹ or L² is —O(C═O)—, —(C═O)O—, —C(═O)—, —O—, —S(O)ₓ—, —S—S—, —C(═O)S—, SC(═O)—, —NR^{a}C(═O)—, —C(═O)NR^{a}—, NR^{a}C(═O)NR^{a}—, —OC(═O)NR^{a}—

or
—NR^{a}C(═O)O— or a direct bond;

[0554] G¹ and G² are each independently unsubstituted C₁-C₁₂ alkylene or C₁-C₁₂ alkenylene;

[0555] G³ is C₁-C₂₄ alkylene, C₁-C₂₄ alkenylene, C₃-C₈ cycloalkylene, C₃-C₁₂ cycloalkenylene;

[0556] R^{a} is H or C₁-C₁₂ alkyl;

[0557] R¹ and R² are each independently C₆-C₂₄ alkyl or C₆-C₂₄ alkenyl;

[0558] R³ is H, OR⁵, CN, —C(═O)OR⁴, —OC(═O)R⁴ or —NR⁵C(═O)R⁴;

[0559] R⁴ is C₁-C₁₂ alkyl;

[0560] R⁵ is H or C₁-C₆ alkyl; and

[0561] x is 0, 1 or 2.

[0562] In some of the foregoing embodiments of Formula (III), the lipid has one of the following Formulae (IIIA) or (IIIB):

[chemical structure]

wherein:

[0563] A is a 3 to 8-membered cycloalkyl or cycloalkylene ring;

[0564] R⁶ is, at each occurrence, independently H, OH or C₁-C₂₄ alkyl;

[0565] n is an integer ranging from 1 to 15.

[0566] In some of the foregoing embodiments of Formula (III), the lipid has Formula (IIIA), and in other embodiments, the lipid has Formula (IIIB).

[0567] In other embodiments of Formula (III), the lipid has one of the following Formulae (IIC) or (IIID):

[chemical structure]

wherein y and z are each independently integers ranging from 1 to 12.

[0568] In any of the foregoing embodiments of Formula (III), one of L¹ or L² is —O(C═O)—. For example, in some embodiments each of L¹ and L² are —O(C═O)—. In some different embodiments of any of the foregoing, L¹ and L² are each independently —(C═)O— or —O(C═O)—. For example, in some embodiments each of L and L² is —(C═O)O—.

[0569] In some different embodiments of Formula (III), the lipid has one of the following Formulae (IIIE) or (IIIF):

[chemical structure]

[0570] In some of the foregoing embodiments of Formula (III), the lipid has one of the following Formulae (IIIG), (IIIH), (IIII), or (IIIJ):

[chemical structure]

[0571] In some of the foregoing embodiments of Formula (III), n is an integer ranging from 2 to 12, for example from 2 to 8 or from 2 to 4. For example, in some embodiments, n is 3, 4, 5 or 6. In some embodiments, n is 3. In some embodiments, n is 4. In some embodiments, n is 5. In some embodiments, n is 6.

[0572] In some other of the foregoing embodiments of Formula (III), y and z are each independently an integer ranging from 2 to 10. For example, in some embodiments, y and z are each independently an integer ranging from 4 to 9 or from 4 to 6.

[0573] In some of the foregoing embodiments of Formula (III), R⁶ is H. In other of the foregoing embodiments, R⁶ is C₁-C₂₄ alkyl. In other embodiments, R⁶ is OH.

[0574] In some embodiments of Formula (III), G³ is unsubstituted. In other embodiments, G3 is substituted. In various different embodiments, G³ is linear C₁-C₂₄ alkylene or linear C₁-C₂₄ alkenylene.

[0575] In some other foregoing embodiments of Formula (III), R¹ or R², or both, is C₆-C₂₄ alkenyl. For example, in some embodiments, R¹ and R² each, independently have the following structure:

[chemical structure]

wherein:

[0576] R^{7a} and R^{7b} are, at each occurrence, independently H or C₁-C₁₂ alkyl; and

[0577] a is an integer from 2 to 12,

[0578] wherein R^{7a}, R^{7b} and a are each selected such that R¹ and R² each independently comprise from 6 to 20 carbon atoms. For example, in some embodiments a is an integer ranging from 5 to 9 or from 8 to 12.

[0579] In some of the foregoing embodiments of Formula (III), at least one occurrence of R^{7a} is H. For example, in some embodiments, R^{7a} is H at each occurrence. In other different embodiments of the foregoing, at least one occurrence of R^{7b} is C₁-C₈ alkyl. For example, in some embodiments, C₁-C₈ alkyl is methyl, ethyl, n-propyl, iso-propyl, n-butyl, iso-butyl, tert-butyl, n-hexyl or n-octyl.

[0580] In different embodiments of Formula (III), R¹ or R², or both, has one of the following structures:

[chemical structure]

[0581] In some of the foregoing embodiments of Formula (III), R³ is OH, CN, —C(═O)OR⁴, —OC(═O)R⁴ or —NHC(═O)R⁴. In some embodiments, R⁴ is methyl or ethyl.

[0582] In some specific embodiments of Embodiment 3, the first and second cationic lipids are each, independently selected from a lipid of Formula III.

[0583] In various different embodiments, a cationic lipid of any one of the disclosed embodiments (e.g., the cationic lipid, the first cationic lipid, the second cationic lipid) of Formula (III) has one of the structures set forth in Table 3 below.

TABLE 3
Representative Compounds of Formula (III)

| No. | Structure | pKa |
|---|---|---|
| III-1 | [chemical structure] | 5.89 |
| III-2 | [chemical structure] | 6.05 |
| III-3 | [chemical structure] | 6.09 |
| III-4 | [chemical structure] | 5.60 |
| III-5 | [chemical structure] | 5.59 |
| III-6 | [chemical structure] | 5.42 |
| III-7 | [chemical structure] | 6.11 |
| III-8 | [chemical structure] | 5.84 |
| III-9 | [chemical structure] | — |
| III-10 | [chemical structure] | — |
| III-11 | [chemical structure] | — |
| III-12 | [chemical structure] | — |
| III-13 | [chemical structure] | — |
| III-14 | [chemical structure] | — |
| III-15 | [chemical structure] | 6.14 |
| III-16 | [chemical structure] | 6.31 |
| III-17 | [chemical structure] | 6.28 |
| III-18 | [chemical structure] | — |
| III-19 | [chemical structure] | — |
| III-20 | [chemical structure] | 6.36 |
| III-21 | [chemical structure] | — |
| III-22 | [chemical structure] | 6.10 |
| III-23 | [chemical structure] | 5.98 |
| III-24 | [chemical structure] | — |
| III-25 | [chemical structure] | 6.22 |
| III-26 | [chemical structure] | 5.84 |
| III-27 | [chemical structure] | 5.77 |
| III-28 | [chemical structure] | — |
| III-29 | [chemical structure] | — |
| III-30 | [chemical structure] | 6.09 |
| III-31 | [chemical structure] | — |
| III-32 | [chemical structure] | — |
| III-33 | [chemical structure] | — |
| III-34 | [chemical structure] | — |
| III-35 | [chemical structure] | — |
| III-36 | [chemical structure] | — |
| III-37 | [chemical structure] | — |
| III-38 | [chemical structure] | — |
| III-39 | [chemical structure] | — |
| III-40 | [chemical structure] | — |
| III-41 | [chemical structure] | — |
| III-42 | [chemical structure] | — |
| III-43 | [chemical structure] | — |
| III-44 | [chemical structure] | — |
| III-45 | [chemical structure] | — |
| III-46 | [chemical structure] | — |
| III-47 | [chemical structure] | — |
| III-48 | [chemical structure] | — |
| III-49 | [chemical structure] | — |

[0584] In one embodiment, the cationic lipid of any one of Embodiments 1, 2, 3, 4 or 5 has a structure of Formula (IV):

[chemical structure]

[0585] or a pharmaceutically acceptable salt, prodrug or stereoisomer thereof, wherein:

[0586] one of G¹ or G² is, at each occurrence, —O(C═O)—, —(C═O)O—, —C(═O)—, —O—, —S(O)_{y}—, —S—S—, —C(═O)S—, SC(═O)—, —N(R^{a})C(═O)—, —C(═O)N(R^{a})—, —N(R^{a})C(═O)N(R^{a})—, —OC(═O)N(R^{a})— or —N(R^{a})C(═O)O—, and the other of G¹ or G² is, at each occurrence, —O(C═O)—, —(C═O)O—, —C(═O)—, —O—, —S(O)_{y}—, —S—S—, —C(═O)S—, —SC(═O)—, —N(R^{a})C(═O)—, —C(═O)N(R^{a})—, —N(R^{a})C(═O)N(R^{a})—, —OC(═O)N(R^{a})— or —N(R^{a})C(═O)O— or a direct bond;

[0587] L is, at each occurrence, ˜O(C═O)—, wherein represents a covalent bond to X;

[0588] X is CR^{a};

[0589] Z is alkyl, cycloalkyl or a monovalent moiety comprising at least one polar functional group when n is 1; or Z is alkylene, cycloalkylene or a polyvalent moiety comprising at least one polar functional group when n is greater than 1;

[0590] R^{a} is, at each occurrence, independently H, C₁-C₂ alkyl, C₁-C₁₂ hydroxylalkyl, C₁-C₁₂ aminoalkyl, C₁-C₁₂ alkylaminylalkyl, C₁-C₁₂ alkoxyalkyl, C₁-C₁₂ alkoxycarbonyl, C₁-C₁₂ alkylcarbonyloxy, C₁-C₁₂ alkylcarbonyloxyalkyl or C₁-C₁₂ alkylcarbonyl;

[0591] R is, at each occurrence, independently either: (a) H or C₁-C₁₂ alkyl; or (b) R together with the carbon atom to which it is bound is taken together with an adjacent R and the carbon atom to which it is bound to form a carbon-carbon double bond;

[0592] R¹ and R² have, at each occurrence, the following structure, respectively:

[chemical structure]

[0593] a¹ and a² are, at each occurrence, independently an integer from 3 to 12;

[0594] b¹ and b² are, at each occurrence, independently 0 or 1;

[0595] c¹ and c² are, at each occurrence, independently an integer from 5 to 10;

[0596] d¹ and d² are, at each occurrence, independently an integer from 5 to 10;

[0597] y is, at each occurrence, independently an integer from 0 to 2; and

[0598] n is an integer from 1 to 6,

[0599] wherein each alkyl, alkylene, hydroxylalkyl, aminoalkyl, alkylaminylalkyl, alkoxyalkyl, alkoxycarbonyl, alkylcarbonyloxy, alkylcarbonyloxyalkyl and alkylcarbonyl is optionally substituted with one or more substituent.

[0600] In some embodiments of Formula (IV), G¹ and G² are each independently

### —O(C═O)— or —(C═O)O—.

[0601] In other embodiments of Formula (IV), X is CH.

[0602] In different embodiments of Formula (IV), the sum of a¹+b¹+c¹ or the sum of a²+b²+c² is an integer from 12 to 26.

[0603] In still other embodiments of Formula (IV), a¹ and a² are independently an integer from 3 to 10. For example, in some embodiments a¹ and a² are independently an integer from 4 to 9.

[0604] In various embodiments of Formula (IV), b¹ and b² are 0. Indifferent embodiments, b¹ and b² are 1.

[0605] In more embodiments of Formula (IV), c¹, c², d¹ and d² are independently an integer from 6 to 8.

[0606] In other embodiments of Formula (IV), c¹ and c² are, at each occurrence, independently an integer from 6 to 10, and d¹ and d² are, at each occurrence, independently an integer from 6 to 10.

[0607] In other embodiments of Formula (IV), c¹ and c² are, at each occurrence, independently an integer from 5 to 9, and d¹ and d² are, at each occurrence, independently an integer from 5 to 9.

[0608] In more embodiments of Formula (IV), Z is alkyl, cycloalkyl or a monovalent moiety comprising at least one polar functional group when n is 1. In other embodiments, Z is alkyl.

[0609] In various embodiments of the foregoing Formula (IV), R is, at each occurrence, independently either: (a) H or methyl; or (b) R together with the carbon atom to which it is bound is taken together with an adjacent R and the carbon atom to which it is bound to form a carbon-carbon double bond. In certain embodiments, each R is H. In other embodiments at least one R together with the carbon atom to which it is bound is taken together with an adjacent R and the carbon atom to which it is bound to form a carbon-carbon double bond.

[0610] In other embodiments of the compound of Formula (IV), R¹ and R² independently have one of the following structures:

[chemical structure]

[0611] In certain embodiments of Formula (IV), the compound has one of the following structures:

[chemical structure]

[chemical structure]

[chemical structure]

[chemical structure]

[0612] In still different embodiments the cationic lipid of Embodiments 1, 2, 3, 4 or 5 has the structure of Formula (V):

[chemical structure]

or a pharmaceutically acceptable salt, prodrug or stereoisomer thereof, wherein:

[0613] one of G¹ or G² is, at each occurrence, —O(C═O)—, —(C═O)O—, —C(═O)—, —O—, —S(O)_{y}—, —S—S—, —C(═O)S—, SC(═O)—, —N(R^{a})C(═O)—, —C(═O)N(R^{a})—, —N(R^{a})C(═O)N(R^{a})—, —OC(═O)N(R^{a})— or —N(R^{a})C(═O)O—, and the other of G¹ or G² is, at each occurrence, —O(C═O)—, —(C═O)O—, —C(═O)—, —O—, —S(O)_{y}—, —S—S—, —C(═O)S—, —SC(═O)—, —N(R^{a})C(═O)—, —C(═O)N(R^{a})—, —N(R^{a})C(═O)N(R^{a})—, —OC(═O)N(R^{a})— or —N(R^{a})C(═O)O— or a direct bond;

[0614] L is, at each occurrence, ˜O(C═O)—, wherein represents a covalent bond to X;

[0615] X is CR^{a};

[0616] Z is alkyl, cycloalkyl or a monovalent moiety comprising at least one polar functional group when n is 1; or Z is alkylene, cycloalkylene or a polyvalent moiety comprising at least one polar functional group when n is greater than 1;

[0617] R^{a} is, at each occurrence, independently H, C₁-C₁₂ alkyl, C₁-C₁₂ hydroxylalkyl, C₁-C₁₂ aminoalkyl, C₁-C₁₂ alkylaminylalkyl, C₁-C₁₂ alkoxyalkyl, C₁-C₁₂ alkoxycarbonyl, C₁-C₁₂ alkylcarbonyloxy, C₁-C₁₂ alkylcarbonyloxyalkyl or C₁-C₁₂ alkylcarbonyl;

[0618] R is, at each occurrence, independently either: (a) H or C₁-C₁₂ alkyl; or (b) R together with the carbon atom to which it is bound is taken together with an adjacent R and the carbon atom to which it is bound to form a carbon-carbon double bond;

[0619] R¹ and R² have, at each occurrence, the following structure, respectively:

[chemical structure]

[0620] R′ is, at each occurrence, independently H or C₁-C₁₂ alkyl;

[0621] a¹ and a² are, at each occurrence, independently an integer from 3 to 12;

[0622] b¹ and b² are, at each occurrence, independently 0 or 1;

[0623] c¹ and c² are, at each occurrence, independently an integer from 2 to 12;

[0624] d¹ and d² are, at each occurrence, independently an integer from 2 to 12;

[0625] y is, at each occurrence, independently an integer from 0 to 2; and

[0626] n is an integer from 1 to 6,

[0627] wherein a¹, a², c, c², d¹ and d² are selected such that the sum of a¹+c¹+d¹ is an integer from 18 to 30, and the sum of a²+c²+d² is an integer from 18 to 30, and wherein each alkyl, alkylene, hydroxylalkyl, aminoalkyl, alkylaminylalkyl, alkoxyalkyl, alkoxycarbonyl, alkylcarbonyloxy, alkylcarbonyloxyalkyl and alkylcarbonyl is optionally substituted with one or more substituent.

[0628] In certain embodiments of Formula (V), G¹ and G² are each independently

### —O(C═O)— or —(C═O)O—.

[0629] In other embodiments of Formula (V), X is CH.

[0630] In some embodiments of Formula (V), the sum of a¹+c¹+d¹ is an integer from 20 to 30, and the sum of a²+c²+d² is an integer from 18 to 30. In other embodiments, the sum of a¹+c¹+d¹ is an integer from 20 to 30, and the sum of a²+c²+d² is an integer from 20 to 30. In more embodiments of Formula (V), the sum of a¹+b¹+c¹ or the sum of a²+b²+c² is an integer from 12 to 26. In other embodiments, a¹, a², c¹, c², d¹ and d² are selected such that the sum of a¹+c¹+d¹ is an integer from 18 to 28, and the sum of a²+c²+d² is an integer from 18 to 28,

[0631] In still other embodiments of Formula (V), a¹ and a² are independently an integer from 3 to 10, for example an integer from 4 to 9.

[0632] In yet other embodiments of Formula (V), b¹ and b² are 0. Indifferent embodiments b¹ and b² are 1.

[0633] In certain other embodiments of Formula (V), c¹, c², d¹ and d² are independently an integer from 6 to 8.

[0634] In different other embodiments of Formula (V), Z is alkyl or a monovalent moiety comprising at least one polar functional group when n is 1; or Z is alkylene or a polyvalent moiety comprising at least one polar functional group when n is greater than 1.

[0635] In more embodiments of Formula (V), Z is alkyl, cycloalkyl or a monovalent moiety comprising at least one polar functional group when n is 1. In other embodiments, Z is alkyl.

[0636] In other different embodiments of Formula (V), R is, at each occurrence, independently either: (a) H or methyl; or (b) R together with the carbon atom to which it is bound is taken together with an adjacent R and the carbon atom to which it is bound to form a carbon-carbon double bond. For example in some embodiments each R is H. In other embodiments at least one R together with the carbon atom to which it is bound is taken together with an adjacent R and the carbon atom to which it is bound to form a carbon-carbon double bond.

[0637] In more embodiments, each R′ is H.

[0638] In certain embodiments of Formula (V), the sum of a¹+c¹+d¹ is an integer from 20 to 25, and the sum of a²+c²+d² is an integer from 20 to 25.

[0639] In other embodiments of Formula (V), R¹ and R² independently have one of the following structures:

[chemical structure]

[0640] In more embodiments of Formula (V), the compound has one of the following structures:

[chemical structure]

[chemical structure]

[chemical structure]

[chemical structure]

[0641] In any of the foregoing embodiments of Formula (IV) or (V), n is 1. In other of the foregoing embodiments of Formula (IV) or (V), n is greater than 1.

[0642] In more of any of the foregoing embodiments of Formula (IV) or (V), Z is a mono- or polyvalent moiety comprising at least one polar functional group. In some embodiments, Z is a monovalent moiety comprising at least one polar functional group. In other embodiments, Z is a polyvalent moiety comprising at least one polar functional group.

[0643] In more of any of the foregoing embodiments of Formula (IV) or (V), the polar functional group is a hydroxyl, alkoxy, ester, cyano, amide, amino, alkylaminyl, heterocyclyl or heteroaryl functional group.

[0644] In any of the foregoing embodiments of Formula (IV) or (V), Z is hydroxyl, hydroxylalkyl, alkoxyalkyl, amino, aminoalkyl, alkylaminyl, alkylaminylalkyl, heterocyclyl or heterocyclylalkyl.

[0645] In some other embodiments of Formula (IV) or (V), Z has the following structure:

[chemical structure]

wherein:

[0646] R⁵ and R⁶ are independently H or C₁-C₆ alkyl;

[0647] R⁷ and R⁸ are independently H or C₁-C₆ alkyl or R⁷ and R⁸, together with the nitrogen atom to which they are attached, join to form a 3-7 membered heterocyclic ring; and

[0648] x is an integer from 0 to 6.

[0649] In still different embodiments of Formula (IV) or (V), Z has the following structure:

[chemical structure]

wherein:

[0650] R⁵ and R⁶ are independently H or C₁-C₆ alkyl;

[0651] R⁷ and R⁸ are independently H or C₁-C₆ alkyl or R⁷ and R⁸, together with the nitrogen atom to which they are attached, join to form a 3-7 membered heterocyclic ring; and

[0652] x is an integer from 0 to 6.

[0653] In still different embodiments of formula (IV) or (V), Z has the following structure:

[chemical structure]

wherein:

[0654] R⁵ and R⁶ are independently H or C₁-C₆ alkyl;

[0655] R⁷ and R⁸ are independently H or C₁-C₆ alkyl or R⁷ and R⁸, together with the nitrogen atom to which they are attached, join to form a 3-7 membered heterocyclic ring; and

[0656] x is an integer from 0 to 6.

[0657] In some other embodiments of Formula (IV) or (V), Z is hydroxylalkyl, cyanoalkyl or an alkyl substituted with one or more ester or amide groups.

[0658] For example, in any of the foregoing embodiments of Formula (IV) or (V), Z has one of the following structures:

[chemical structure]

[chemical structure]

[0659] In other embodiments of Formula (IV) or (V), Z-L has one of the following structures:

[chemical structure]

[chemical structure]

[chemical structure]

[chemical structure]

[chemical structure]

[0660] In other embodiments, Z-L has one of the following structures:

[chemical structure]

[0661] In still other embodiments, X is CH and Z-L has one of the following structures:

[chemical structure]

[0662] In various different embodiments, a cationic lipid of any one Embodiments 1, 2, 3, 4 or 5 has one of the structures set forth in Table 4 below.

TABLE 4
Representative Compounds of Formula (IV) or (V)

| No. | Structure |
|---|---|
| IV-1 | [chemical structure] |
| IV-2 | [chemical structure] |
| IV-3 | [chemical structure] |

[0663] In one embodiment, the cationic lipid is a compound having the following structure (VI):

[chemical structure]

or a pharmaceutically acceptable salt, tautomer, prodrug or stereoisomer thereof, wherein:

[0664] L¹ and L² are each independently —O(C═)-, —(C═O)O—, —C(═O)—, —O—, —S(O)ₓ—, —S—S—, —C(═O)S—, —SC(═O)—, —NR^{a}C(═O)—, —C(═O)NR^{a}—, —NR^{a}C(═O)NR^{a}—, —OC(═O)NR^{a}—, —NR^{a}C(═O)O— or a direct bond;

[0665] G¹ is C₁-C₂ alkylene, —(C═O)—, —O(C═O)—, —SC(═O)—, —NR^{a}C(═O)— or a direct bond;

[0666] G² is —C(═O)—, —(C═O)O—, —C(═O)S—, —C(═O)NR^{a}— or a direct bond;

[0667] G³ is C₁-C₆ alkylene;

[0668] R^{a} is H or C₁-C₁₂ alkyl;

[0669] R^{1a} and R^{1b} are, at each occurrence, independently either: (a) H or C₁-C₁₂ alkyl; or (b) R^{1a} is H or C₁-C₁₂ alkyl, and R^{1b} together with the carbon atom to which it is bound is taken together with an adjacent R^{1b} and the carbon atom to which it is bound to form a carbon-carbon double bond;

[0670] R^{2a} and R^{2b} are, at each occurrence, independently either: (a) H or C₁-C₁₂ alkyl; or (b) R^{2a}, is H or C₁-C₁₂ alkyl, and R^{2b} together with the carbon atom to which it is bound is taken together with an adjacent R^{2b} and the carbon atom to which it is bound to form a carbon-carbon double bond;

[0671] R^{3a} and R^{3b} are, at each occurrence, independently either (a): H or C₁-C₁₂ alkyl; or (b) R^{3a} is H or C₁-C₁₂ alkyl, and R^{3b} together with the carbon atom to which it is bound is taken together with an adjacent R^{3b} and the carbon atom to which it is bound to form a carbon-carbon double bond;

[0672] R^{4a} and R^{4b} are, at each occurrence, independently either: (a) H or C₁-C₁₂ alkyl; or (b) R^{4a} is H or C₁-C₁₂ alkyl, and R^{4b} together with the carbon atom to which it is bound is taken together with an adjacent R^{4b} and the carbon atom to which it is bound to form a carbon-carbon double bond;

[0673] R⁵ and R⁶ are each independently H or methyl;

[0674] R⁷ is H or C₁-C₂₀ alkyl;

[0675] R⁸ is OH, —N(R⁹)(C═O)R¹⁰, —(C═O)NR⁹R¹⁰, —NR⁹R¹⁰, —(C═O)OR¹¹ or —O(C═O)R¹¹, provided that G³ is C₄-C₆ alkylene when R⁸ is —NR⁹R¹⁰

[0676] R⁹ and R¹⁰ are each independently H or C₁-C₁₂ alkyl;

[0677] R¹¹ is aralkyl;

[0678] a, b, c and d are each independently an integer from 1 to 24; and

[0679] x is 0, 1 or 2,

wherein each alkyl, alkylene and aralkyl is optionally substituted.

[0680] In some embodiments of structure (VI), L¹ and L² are each independently —O(C═O)—, —(C═O)O— or a direct bond. In other embodiments, G¹ and G² are each independently —(C═O)— or a direct bond. In some different embodiments, L¹ and L² are each independently —O(C═O)—, —(C═O)O— or a direct bond; and G¹ and G² are each independently —(C═O)— or a direct bond.

[0681] In some different embodiments of structure (VI), L¹ and L² are each independently —C(═O)—, —O—, —S(O)ₓ—, —S—S—, —C(═O)S—, —SC(═O)—, —NR^{a}—, —NR^{a}C(═O)—, —C(═O)NR^{a}—, —NR^{a}C(═O)NR^{a}, —OC(═O)NR^{a}—, —NR^{a}C(═O)O—, —NR^{a}S(O)ₓNR^{a}, —NR^{a}S(O)ₓ— or —S(O)ₓNR^{a}—.

[0682] In other of the foregoing embodiments of structure (VI), the compound has one of the following structures (VIA) or (VIB).

[chemical structure]

[0683] In some embodiments, the compound has structure (VIA). In other embodiments, the compound has structure (VIB).

[0684] In any of the foregoing embodiments of structure (VI), one of L¹ or L² is —O(C═O)—. For example, in some embodiments each of L¹ and L² are —O(C═O)—.

[0685] In some different embodiments of any of the foregoing, one of L¹ or L² is —(C═O)O—. For example, in some embodiments each of L¹ and L² is —(C═O)O—.

[0686] In different embodiments of structure (VI), one of L¹ or L² is a direct bond. As used herein, a “direct bond” means the group (e.g., L¹ or L²) is absent. For example, in some embodiments each of L¹ and L² is a direct bond.

[0687] In other different embodiments of the foregoing, for at least one occurrence of R^{1a} and R^{1b}, R^{1a} is H or C₁-C₁₂ alkyl, and R^{1b} together with the carbon atom to which it is bound is taken together with an adjacent R^{1b} and the carbon atom to which it is bound to form a carbon-carbon double bond.

[0688] In still other different embodiments of structure (VI), for at least one occurrence of R^{4a} and R^{4b}, R^{4a} is H or C₁-C₁₂ alkyl, and R^{4b} together with the carbon atom to which it is bound is taken together with an adjacent R^{4b} and the carbon atom to which it is bound to form a carbon-carbon double bond.

[0689] In more embodiments of structure (VI), for at least one occurrence of R^{2a} and R^{2b}, R^{2a} is H or C₁-C₁₂ alkyl, and R^{2b} together with the carbon atom to which it is bound is taken together with an adjacent R^{2b} and the carbon atom to which it is bound to form a carbon-carbon double bond.

[0690] In other different embodiments of any of the foregoing, for at least one occurrence of R^{3a} and R^{3b}, R^{3a} is H or C₁-C₁₂ alkyl, and R^{3b} together with the carbon atom to which it is bound is taken together with an adjacent R^{3b} and the carbon atom to which it is bound to form a carbon-carbon double bond.

[0691] It is understood that “carbon-carbon” double bond refers to one of the following structures:

[chemical structure]

wherein R^{c} and R^{d} are, at each occurrence, independently H or a substituent. For example, in some embodiments R^{c} and R^{d} are, at each occurrence, independently H, C₁-C₁₂ alkyl or cycloalkyl, for example H or C₁-C₁₂ alkyl.

[0692] In various other embodiments, the compound has one of the following structures (VIC) or (VID):

[chemical structure]

wherein e, f, g and h are each independently an integer from 1 to 12.

[0693] In some embodiments, the compound has structure (VIC). In other embodiments, the compound has structure (VID).

[0694] In various embodiments of the compounds of structures (VIC) or (VID), e, f, g and h are each independently an integer from 4 to 10.

[0695] In other different embodiments,

[chemical structure]

or both, independently has one of the following structures:

[chemical structure]

[chemical structure]

[0696] In certain embodiments of the foregoing, a, b, c and d are each independently an integer from 2 to 12 or an integer from 4 to 12. In other embodiments, a, b, c and d are each independently an integer from 8 to 12 or 5 to 9. In some certain embodiments, a is 0. In some embodiments, a is 1. In other embodiments, a is 2. In more embodiments, a is 3. In yet other embodiments, a is 4. In some embodiments, a is 5. In other embodiments, a is 6. In more embodiments, a is 7. In yet other embodiments, a is 8. In some embodiments, a is 9. In other embodiments, a is 10. In more embodiments, a is 11. In yet other embodiments, a is 12. In some embodiments, a is 13. In other embodiments, a is 14. In more embodiments, a is 15. In yet other embodiments, a is 16.

[0697] In some embodiments of structure (VI), b is 1. In other embodiments, b is 2. In more embodiments, b is 3. In yet other embodiments, b is 4. In some embodiments, b is 5. In other embodiments, b is 6. In more embodiments, b is 7. In yet other embodiments, b is 8. In some embodiments, b is 9. In other embodiments, b is 10. In more embodiments, b is 11. In yet other embodiments, b is 12. In some embodiments, b is 13. In other embodiments, b is 14. In more embodiments, b is 15. In yet other embodiments, b is 16.

[0698] In some embodiments of structure (VI), c is 1. In other embodiments, c is 2. In more embodiments, c is 3. In yet other embodiments, c is 4. In some embodiments, c is 5. In other embodiments, c is 6. In more embodiments, c is 7. In yet other embodiments, c is 8. In some embodiments, c is 9. In other embodiments, c is 10. In more embodiments, c is 11. In yet other embodiments, c is 12. In some embodiments, c is 13. In other embodiments, c is 14. In more embodiments, c is 15. In yet other embodiments, c is 16.

[0699] In some certain embodiments of structure (VI), d is 0. In some embodiments, d is 1. In other embodiments, d is 2. In more embodiments, d is 3. In yet other embodiments, d is 4. In some embodiments, d is 5. In other embodiments, d is 6. In more embodiments, d is 7. In yet other embodiments, d is 8. In some embodiments, d is 9. In other embodiments, d is 10. In more embodiments, d is 11. In yet other embodiments, d is 12. In some embodiments, d is 13. In other embodiments, d is 14. In more embodiments, d is 15. In yet other embodiments, d is 16.

[0700] In some embodiments of structure (VI), e is 1. In other embodiments, e is 2. In more embodiments, e is 3. In yet other embodiments, e is 4. In some embodiments, e is 5. In other embodiments, e is 6. In more embodiments, e is 7. In yet other embodiments, e is 8. In some embodiments, e is 9. In other embodiments, e is 10. In more embodiments, e is 11. In yet other embodiments, e is 12.

[0701] In some embodiments of structure (VI), f is 1. In other embodiments, f is 2. In more embodiments, f is 3. In yet other embodiments, f is 4. In some embodiments, f is 5. In other embodiments, f is 6. In more embodiments, f is 7. In yet other embodiments, f is 8. In some embodiments, f is 9. In other embodiments, f is 10. In more embodiments, f is 11. In yet other embodiments, f is 12.

[0702] In some embodiments of structure (VI), g is 1. In other embodiments, g is 2. In more embodiments, g is 3. In yet other embodiments, g is 4. In some embodiments, g is 5. In other embodiments, g is 6. In more embodiments, g is 7. In yet other embodiments, g is 8. In some embodiments, g is 9. In other embodiments, g is 10. In more embodiments, g is 11. In yet other embodiments, g is 12.

[0703] In some embodiments of structure (VI), h is 1. In other embodiments, e is 2. In more embodiments, h is 3. In yet other embodiments, h is 4. In some embodiments, e is 5. In other embodiments, h is 6. In more embodiments, h is 7. In yet other embodiments, h is 8. In some embodiments, h is 9. In other embodiments, h is 10. In more embodiments, his 11. In yet other embodiments, his 12.

[0704] In some other various embodiments of structure (VI), a and d are the same. In some other embodiments, b and c are the same. In some other specific embodiments a and d are the same and b and c are the same.

[0705] The sum of a and b and the sum of c and d are factors which may be varied to obtain a lipid having the desired properties. In one embodiment, a and b are chosen such that their sum is an integer ranging from 14 to 24. In other embodiments, c and d are chosen such that their sum is an integer ranging from 14 to 24. In further embodiment, the sum of a and b and the sum of c and d are the same. For example, in some embodiments the sum of a and b and the sum of c and d are both the same integer which may range from 14 to 24. In still more embodiments, a. b, c and d are selected such that the sum of a and b and the sum of c and d is 12 or greater.

[0706] The substituents at R^{1a}, R^{2a}, R^{3a} and R^{4a} are not particularly limited. In some embodiments, at least one of R^{1a}, R^{2a}, R^{3a} and R^{4a} is H. In certain embodiments R^{1a}, R^{2a}, R^{3a} and R^{4a} are H at each occurrence. In certain other embodiments at least one of R^{1a}, R^{2a}, R^{3a} and R^{4a} is C₁-C₁₂ alkyl. In certain other embodiments at least one of R^{1a}, R^{2a}, R^{3a} and R^{4a} is C₁-C₈ alkyl. In certain other embodiments at least one of R^{1a}, R^{2a}, R^{3a} and R^{4a} is C₁-C₆ alkyl. In some of the foregoing embodiments, the C₁-C₈ alkyl is methyl, ethyl, n-propyl, iso-propyl, n-butyl, iso-butyl, tert-butyl, n-hexyl or n-octyl.

[0707] In certain embodiments of the foregoing, R^{1a}, R^{1b}, R^{4a} and R^{4b} are C₁-C₁₂ alkyl at each occurrence.

[0708] In further embodiments of the foregoing, at least one of R^{1b}, R^{2b}, R^{3b} and R^{4b} is H or R^{1b}, R^{2b}, R^{3b} and R^{4b} are H at each occurrence.

[0709] In certain embodiments of the foregoing, R^{1b} together with the carbon atom to which it is bound is taken together with an adjacent R^{1b} and the carbon atom to which it is bound to form a carbon-carbon double bond. In other embodiments of the foregoing R^{4b} together with the carbon atom to which it is bound is taken together with an adjacent R^{4b} and the carbon atom to which it is bound to form a carbon-carbon double bond.

[0710] The substituents at R⁵ and R⁶ are not particularly limited in the foregoing embodiments. In certain embodiments one of R⁵ or R⁶ is methyl. In other embodiments each of R⁵ or R⁶ is methyl.

[0711] The substituents at R⁷ are not particularly limited in the foregoing embodiments. In certain embodiments R⁷ is C₆-C₁₆ alkyl. In some other embodiments, R⁷ is C₆-C₉ alkyl. In some of these embodiments, R⁷ is substituted with —(C═O)OR^{b}, —O(C═O)R^{b}, —C(═O)R^{b}, —OR^{b}, —S(O)R^{b}, —S—SR^{b}, —C(═O)SR^{b}, —SC(═O)R^{b}, —NR^{a}R^{b}, —NR^{a}C(═O)R^{b}, —C(═O)NR^{a}R^{b}, —NR^{a}C(═O)NR^{a}R^{b}, —OC(═O)NR^{a}R^{b}, —NR^{a}C(═O)OR^{b}, —NR^{a}S(O)ₓNR^{a}R^{b}, —NR^{a}S(O)ₓR^{b} or —S(O)ₓNR^{a}R^{b}, wherein: R^{a} is H or C₁-C₁₂ alkyl; R^{b} is C₁-C₁₅ alkyl; and x is 0, 1 or 2. For example, in some embodiments R⁷ is substituted with —(C═O)OR^{b} or —O(C═O)R^{b}.

[0712] In various of the foregoing embodiments of structure (VI), R^{b} is branched C₃-C₁₅ alkyl. For example, in some embodiments R^{b} has one of the following structures:

[chemical structure]

[0713] In certain embodiments, R⁸ is OH.

[0714] In other embodiments of structure (VI), R⁸ is —N(R⁹)(C═O)R¹⁰. In some other embodiments, R⁸ is —(C═O)NR⁹R¹⁰. In still more embodiments, R⁸ is —NR⁹R¹⁰. In some of the foregoing embodiments, R⁹ and R¹⁰ are each independently H or C₁-C₈ alkyl, for example H or C₁-C₃ alkyl. In more specific of these embodiments, the C₁-C₈ alkyl or C₁-C₃ alkyl is unsubstituted or substituted with hydroxyl. In other of these embodiments, R⁹ and R¹⁰ are each methyl.

[0715] In yet more embodiments of structure (VI), R⁸ is —(C═O)OR¹¹. In some of these embodiments R¹¹ is benzyl.

[0716] In yet more specific embodiments of structure (VI), R⁸ has one of the following structures:

[chemical structure]

[0717] In still other embodiments of the foregoing compounds, G³ is C₂-C₅ alkylene, for example C₂-C₄ alkylene, C₃ alkylene or C₄ alkylene. In some of these embodiments, R⁸ is OH. In other embodiments, G² is absent and R⁷ is C₁-C₂ alkylene, such as methyl.

[0718] In various different embodiments, the compound has one of the structures set forth in Table 5 below.

TABLE 5
Representative cationic lipids of structure (VI)

| No. | Structure |
|---|---|
| VI-1 | [chemical structure] |
| VI-2 | [chemical structure] |
| VI-3 | [chemical structure] |
| VI-4 | [chemical structure] |
| VI-5 | [chemical structure] |
| VI-6 | [chemical structure] |
| VI-7 | [chemical structure] |
| VI-8 | [chemical structure] |
| VI-9 | [chemical structure] |
| VI-10 | [chemical structure] |
| VI-11 | [chemical structure] |
| VI-12 | [chemical structure] |
| VI-13 | [chemical structure] |
| VI-14 | [chemical structure] |
| VI-15 | [chemical structure] |
| VI-16 | [chemical structure] |
| VI-17 | [chemical structure] |
| VI-18 | [chemical structure] |
| VI-19 | [chemical structure] |
| VI-20 | [chemical structure] |
| VI-21 | [chemical structure] |
| VI-22 | [chemical structure] |
| VI-23 | [chemical structure] |
| VI-24 | [chemical structure] |
| VI-25 | [chemical structure] |
| VI-26 | [chemical structure] |
| VI-27 | [chemical structure] |
| VI-28 | [chemical structure] |
| VI-29 | [chemical structure] |
| VI-30 | [chemical structure] |
| VI-31 | [chemical structure] |
| VI-32 | [chemical structure] |
| VI-33 | [chemical structure] |
| VI-34 | [chemical structure] |
| VI-35 | [chemical structure] |
| VI-36 | [chemical structure] |
| VI-37 | [chemical structure] |

[0719] In one embodiment, the cationic lipid is a compound having the following structure (VII):

[chemical structure]

or a pharmaceutically acceptable salt, prodrug or stereoisomer thereof, wherein:

[0720] X and X′ are each independently N or CR;

[0721] Y and Y′ are each independently absent, —O(C═O)—, —(C═O)O— or NR, provided that:
[0722] a) Y is absent when X is N;
[0723] b) Y′ is absent when X′ is N;
[0724] c) Y is —O(C═O)—, —(C═O)O— or NR when X is CR; and
[0725] d) Y′ is —O(C═O)—, —(C═O)O— or NR when X′ is CR,

[0726] L¹ and L^{1′} are each independently —O(C═O)R¹, —(C═O)OR¹, —C(═O)R¹, —OR¹, —S(O)_{z}R¹, —S—SR¹, —C(═O)SR¹, —SC(═O)R¹, —NR^{a}C(═O)R¹, —C(═O)NR^{b}R^{c}, —NR^{a}C(═O)NR^{b}R^{c}, —OC(═O)NR^{b}R^{c} or —NR^{a}C(═O)OR¹;

[0727] L² and L^{2′} are each independently —O(C═O)R², —(C═O)OR², —C(═O)R², —OR², —S(O)_{z}R², —S—SR², —C(═O)SR², —SC(═O)R², —NR^{d}C(═O)R², —C(═O)NR^{e}R^{f}, —NR^{d}C(═O)NR^{e}R^{f}, —OC(═O)NR^{e}R^{f}; —NR^{d}C(═O)OR² or a direct bond to R²;

[0728] G¹, G^{1′}, G² and G^{2′} are each independently C₂-C₁₂ alkylene or C₂-C₁₂ alkenylene;

[0729] G³ is C₂-C₂₄ heteroalkylene or C₂-C₂₄ heteroalkenylene;

[0730] R^{a}, R^{b}, R^{d} and R^{e} are, at each occurrence, independently H, C₁-C₁₂ alkyl or C₂-C₁₂ alkenyl;

[0731] R^{c} and R^{f} are, at each occurrence, independently C₁-C₁₂ alkyl or C₂-C₁₂ alkenyl;

[0732] R is, at each occurrence, independently H or C₁-C₁₂ alkyl;

[0733] R¹ and R² are, at each occurrence, independently branched C₆-C₂₄ alkyl or branched C₆-C₂₄ alkenyl;

[0734] z is 0, 1 or 2, and

wherein each alkyl, alkenyl, alkylene, alkenylene, heteroalkylene and heteroalkenylene is independently substituted or unsubstituted unless otherwise specified.

[0735] In other different embodiments of structure (VII):

[0736] X and X′ are each independently N or CR;

[0737] Y and Y′ are each independently absent or NR, provided that:
[0738] a) Y is absent when X is N;
[0739] b) Y′ is absent when X is N;
[0740] c) Y is NR when X is CR; and
[0741] d) Y′ is NR when X′ is CR,

[0742] L¹ and L^{1′} are each independently —O(C═O)R¹, —(C═O)OR¹, —C(═O)R¹, —OR¹, —S(O)_{z}R¹, —S—SR¹, —C(═O)SR¹, —SC(═O)R¹, —NR^{a}C(═O)R¹, —C(═O)NR^{b}R^{c}, —NR^{a}C(═O)NR^{b}R^{c}, —OC(═O)NR^{b}R^{c} or —NR^{a}C(═O)OR¹;

[0743] L² and L^{2′} are each independently —O(C═O)R², —(C═O)OR², —C(═O)R², —OR², —S(O)_{z}R², —S—SR², —C(═O)SR², —SC(═O)R², —NR^{d}C(═O)R², —C(═O)NR^{e}R^{f}, —NR^{d}C(═O)NR^{e}R^{f}, —OC(═O)NR^{e}R^{f}; —NR^{d}C(═O)OR² or a direct bond to R²;

[0744] G¹, G^{1′}, G² and G^{2′} are each independently C₂-C₁₂ alkylene or C₂-C₁₂ alkenylene;

[0745] G³ is C₂-C₂₄ alkyleneoxide or C₂-C₂₄ alkenyleneoxide;

[0746] R^{a}, R^{b}, R^{d} and R^{e} are, at each occurrence, independently H, C₁-C₁₂ alkyl or C₂-C₁₂ alkenyl;

[0747] R^{c} and R^{f} are, at each occurrence, independently C₁-C₁₂ alkyl or C₂-C₁₂ alkenyl;

[0748] R is, at each occurrence, independently H or C₁-C₁₂ alkyl;

[0749] R¹ and R² are, at each occurrence, independently branched C₆-C₂₄ alkyl or branched C₆-C₂₄ alkenyl;

[0750] z is 0, 1 or 2, and

wherein each alkyl, alkenyl, alkylene, alkenylene, alkyleneoxide and alkenyleneoxide is independently substituted or unsubstituted unless otherwise specified.

[0751] In some embodiments of structure (VII), G³ is C₂-C₂₄ alkyleneoxide or C₂-C₂₄ alkenyleneoxide. In certain embodiments, G³ is unsubstituted. In other embodiments, G³ is substituted, for example substituted with hydroxyl. In more specific embodiments G³ is C₂-C₁₂ alkyleneoxide, for example, in some embodiments G³ is C₃-C₇ alkyleneoxide or in other embodiments G³ is C₃-C₁₂ alkyleneoxide.

[0752] In other embodiments of structure (VII), G³ is C₂-C₂₄ alkyleneaminyl or C₂-C₂₄ alkenyleneaminyl, for example C₆-C₁₂ alkyleneaminyl. In some of these embodiments, G³ is unsubstituted. In other of these embodiments, G³ is substituted with C₁-C₆ alkyl.

[0753] In some embodiments of structure (VII), X and X′ are each N, and Y and Y′ are each absent. In other embodiments, X and X′ are each CR, and Y and Y′ are each NR. In some of these embodiments, R is H.

[0754] In certain embodiments of structure (VII), X and X′ are each CR, and Y and Y′ are each independently —O(C═O)— or —(C═O)O—.

[0755] In some of the foregoing embodiments of structure (VII), the compound has one of the following structures (VIIA), (VIIB), (VIIC), (VIID), (VIIE), (VIIF), (VIIG) or (VIIH):

[chemical structure]

wherein R^{d} is, at each occurrence, independently H or optionally substituted C₁-C₆ alkyl. For example, in some embodiments R^{d} is H. In other embodiments, R^{d} is C₁-C₆ alkyl, such as methyl. In other embodiments, R^{d} is substituted C₁-C₆ alkyl, such as C₁-C₆ alkyl substituted with —O(C═O)R, —(C═O)OR, —NRC(═O)R or —C(═O)N(R)₂, wherein R is, at each occurrence, independently H or C₁-C₁₂ alkyl.

[0756] In some of the foregoing embodiments of structure (VII), L¹ and L^{1′} are each independently —O(C═O)R¹, —(C═O)OR¹ or —C(═O)NR^{b}R^{c}, and L² and L² are each independently —O(C═O)R², —(C═O)OR² or —C(═O)NR^{e}R^{f}. For example, in some embodiments L¹ and L^{1′} are each —(C═O)OR¹, and L² and L^{2′} are each —(C═O)OR². In other embodiments L¹ and L^{1′} are each —(C═O)OR¹, and L² and L^{2′} are each —C(═O)NR^{e}R^{f}. In other embodiments L¹ and L^{1′} are each —C(═O)NR^{b}R^{c}, and L² and L^{2′} are each —C(═O)NR^{e}R^{f}.

[0757] In some embodiments of the foregoing, G¹, G^{1′}, G² and G^{2′} are each independently C₂-C₈ alkylene, for example C₄-C₈ alkylene.

[0758] In some of the foregoing embodiments of structure (VII), R¹ or R², are each, at each occurrence, independently branched C₆-C₂₄ alkyl. For example, in some embodiments, R¹ and R² at each occurrence, independently have the following structure.

[chemical structure]

wherein:

[0759] R^{7a} and R^{7b} are, at each occurrence, independently H or C₁-C₁₂ alkyl; and

[0760] a is an integer from 2 to 12,

wherein R^{7a}, R^{7b} and a are each selected such that R¹ and R² each independently comprise from 6 to 20 carbon atoms. For example, in some embodiments a is an integer ranging from 5 to 9 or from 8 to 12.

[0761] In some of the foregoing embodiments of structure (VII), at least one occurrence of R^{7a} is H. For example, in some embodiments, R^{7a} is H at each occurrence. In other different embodiments of the foregoing, at least one occurrence of R^{7b} is C₁-C₈ alkyl. For example, in some embodiments, C₁-C₈ alkyl is methyl, ethyl, n-propyl, iso-propyl, n-butyl, iso-butyl, tert-butyl, n-hexyl or n-octyl.

[0762] In different embodiments of structure (VII), R¹ or R², or both, at each occurrence independently has one of the following structures:

[chemical structure]

[0763] In some of the foregoing embodiments of structure (VII), R^{b}, R^{c}, R^{e} and R^{f}, when present, are each independently C₃-C₁₂ alkyl. For example, in some embodiments R^{b}, R^{c}, R^{e} and R^{f}, when present, are n-hexyl and in other embodiments R^{b}, R^{c}, R^{e} and R^{f}, when present, are n-octyl.

[0764] In various different embodiments of structure (VII), the cationic lipid has one of the structures set forth in Table 6 below.

TABLE 6
Representative cationic lipids of structure (VII)

| No. | Structure |
|---|---|
| VII-1 | [chemical structure] |
| VII-2 | [chemical structure] |
| VII-3 | [chemical structure] |
| VII-4 | [chemical structure] |
| VII-5 | [chemical structure] |
| VII-6 | [chemical structure] |
| VII-7 | [chemical structure] |
| VII-8 | [chemical structure] |
| VII-9 | [chemical structure] |
| VII-10 | [chemical structure] |
| VII-11 | [chemical structure] |

[0765] In one embodiment, the cationic lipid is a compound having the following structure (VIII):

[chemical structure]

or a pharmaceutically acceptable salt, prodrug or stereoisomer thereof, wherein:

[0766] X is N, and Y is absent; or X is CR, and Y is NR;

[0767] L¹ is —O(C═O)R¹, —(C═O)OR¹, —C(═O)R¹, —OR¹, —S(O)ₓR¹, —S—SR¹, —C(═O)SR¹, —SC(═O)R¹, —NR^{a}C(═O)R¹, —C(═O)NR^{b}R^{c}, —NR^{a}C(═O)NR^{b}R^{c}, —OC(═O)NR^{b}R^{c} or —NR^{a}C(═O)OR¹;

[0768] L² is —O(C═O)R², —(C═O)OR², —C(═O)R², —OR², —S(O)ₓR², —S—SR², —C(═O)SR², —SC(═O)R², —NR^{d}C(═O)R², —C(═O)NR^{e}R^{f}, —NR^{d}C(═O)NR^{e}R^{f}, —OC(═O)NR^{e}R^{f}; —NR^{d}C(═O)OR² or a direct bond to R²;

[0769] L³ is —O(C═O)R³ or —(C═O)OR³;

[0770] G¹ and G² are each independently C₂-C₁₂ alkylene or C₂-C₁₂ alkenylene;

[0771] G³ is C₁-C₂₄ alkylene, C₂-C₂₄ alkenylene, C₁-C₂₄ heteroalkylene or C₂-C₂₄ heteroalkenylene;

[0772] R^{a}, R^{b}, R^{d} and R^{e} are each independently H or C₁-C₁₂ alkyl or C₁-C₁₂ alkenyl;

[0773] R^{c} and R^{f} are each independently C₁-C₁₂ alkyl or C₂-C₁₂ alkenyl;

[0774] each R is independently H or C₁-C₁₂ alkyl;

[0775] R¹, R² and R³ are each independently C₁-C₂₄ alkyl or C₂-C₂₄ alkenyl; and

[0776] x is 0, 1 or 2, and

[0777] wherein each alkyl, alkenyl, alkylene, alkenylene, heteroalkylene and heteroalkenylene is independently substituted or unsubstituted unless otherwise specified.

[0778] In more embodiments of structure (I):

[0779] X is N, and Y is absent; or X is CR, and Y is NR;

[0780] L¹ is —O(C═O)R¹, —(C═O)OR¹, —C(═O)R¹, —OR¹, —S(O)ₓR¹, —S—SR¹, —C(═O)SR¹, —SC(═O)R¹, —NR^{a}C(═O)R¹, —C(═O)NR^{b}R^{c}, —NR^{a}C(═O)NR^{b}R^{c}, —OC(═O)NR^{b}R^{c} or —NR^{a}C(═O)OR¹;

[0781] L² is —O(C═O)R², —(C═O)OR², —C(═O)R², —OR², —S(O)ₓR², —S—SR², —C(═O)SR², —SC(═O)R², —NR^{d}C(═O)R², —C(═O)NR^{e}R^{f}, —NR^{d}C(═O)NR^{e}R^{f}, —OC(═O)NR^{c}R^{f}; —NR^{d}C(═O)OR² or a direct bond to R²;

[0782] L³ is —O(C═O)R³ or —(C═O)OR³;

[0783] G¹ and G² are each independently C₂-C₁₂ alkylene or C₂-C₁₂ alkenylene;

[0784] G³ is C₁-C₂₄ alkylene, C₂-C₂₄ alkenylene, C₁-C₂₄ heteroalkylene or C₂-C₂₄ heteroalkenylene when X is CR, and Y is NR; and G³ is C₁-C₂₄ heteroalkylene or C₂-C₂₄ heteroalkenylene when X is N, and Y is absent;

[0785] R^{a}, R^{b}, R^{d} and R^{e} are each independently H or C₁-C₁₂ alkyl or C₁-C₁₂ alkenyl;

[0786] R^{c} and R^{f} are each independently C₁-C₁₂ alkyl or C₂-C₁₂ alkenyl;

[0787] each R is independently H or C₁-C₁₂ alkyl;

[0788] R¹, R² and R³ are each independently C₁-C₂₄ alkyl or C₂-C₂₄ alkenyl; and

[0789] x is 0, 1 or 2, and

[0790] wherein each alkyl, alkenyl, alkylene, alkenylene, heteroalkylene and heteroalkenylene is independently substituted or unsubstituted unless otherwise specified.

[0791] In other embodiments of structure (I):

[0792] X is N and Y is absent, or X is CR and Y is NR;

[0793] L¹ is —O(C═O)R¹, —(C═O)OR¹, —C(═O)R¹, —OR¹, —S(O)ₓR¹, —S—SR¹, —C(═O)SR¹, —SC(═O)R¹, —NR^{a}C(═O)R¹, —C(═O)NR^{b}R^{c}, —NR^{a}C(═O)NR^{b}R^{c}, —OC(═O)NR^{b}R^{c} or —NR^{a}C(═O)OR¹;

[0794] L² is —O(C═O)R², —(C═O)OR², —C(═O)R², —OR², —S(O)ₓR², —S—SR², —C(═O)SR², —SC(═O)R², —NR^{d}C(═O)R², —C(═O)NR^{e}R^{f}, —NR^{d}C(═O)NR^{e}R^{f}, —OC(═O)NR^{e}R^{f}; —NR^{d}C(═O)OR² or a direct bond to R²

[0795] L³ is —O(C═O)R³ or —(C═O)OR³;

[0796] G¹ and G² are each independently C₂-C₁₂ alkylene or C₂-C₁₂ alkenylene;

[0797] G³ is C₁-C₂₄ alkylene, C₂-C₂₄ alkenylene, C₁-C₂₄ heteroalkylene or C₂-C₂₄ heteroalkenylene;

[0798] R^{a}, R^{b}, R^{d} and R^{e} are each independently H or C₁-C₁₂ alkyl or C₁-C₁₂ alkenyl;

[0799] R^{c} and R^{f} are each independently C₁-C₁₂ alkyl or C₂-C₁₂ alkenyl;

[0800] each R is independently H or C₁-C₁₂ alkyl;

[0801] R¹, R² and R³ are each independently branched C₆-C₂₄ alkyl or branched C₆-C₂₄ alkenyl; and

[0802] x is 0, 1 or 2, and

wherein each alkyl, alkenyl, alkylene, alkenylene, heteroalkylene and heteroalkenylene is independently substituted or unsubstituted unless otherwise specified.

[0803] In certain embodiments of structure (VIII), G³ is unsubstituted. In more specific embodiments G³ is C₂-C₁₂ alkylene, for example, in some embodiments G³ is C₃-C₇ alkylene or in other embodiments G³ is C₃-C₁₂ alkylene. In some embodiments, G³ is C₂ or C₃ alkylene.

[0804] In other embodiments of structure (VIII), G³ is C₁-C₁₂ heteroalkylene, for example C₁-C₁₂ aminylalkylene.

[0805] In certain embodiments of structure (VIII), X is N and Y is absent. In other embodiments, X is CR and Y is NR, for example in some of these embodiments R is H.

[0806] In some of the foregoing embodiments of structure (VIII), the compound has one of the following structures (VIIIA), (VIIIB), (VIIIC) or (VIIID):

[chemical structure]

[0807] In some of the foregoing embodiments of structure (VIII), L¹ is —O(C═O)R¹, —(C═O)OR¹ or

—C(═O)NR^{b}R^{c}, and L² is —O(C═O)R², —(C═O)OR² or —C(═O)NR^{e}R^{f}. In other specific embodiments, L¹ is —(C═O)OR¹ and L² is —(C═O)OR². In any of the foregoing embodiments, L³ is —(C═O)OR³.

[0808] In some of the foregoing embodiments of structure (VIII), G¹ and G² are each independently C₂-C₁₂ alkylene, for example C₄-C₁₀ alkylene.

[0809] In some of the foregoing embodiments of structure (VIII), R¹, R² and R³ are each, independently branched C₆-C₂₄ alkyl. For example, in some embodiments, R¹, R² and R³ each, independently have the following structure:

[chemical structure]

wherein:

[0810] R^{7a} and R^{7b} are, at each occurrence, independently H or C₁-C₁₂ alkyl; and

[0811] a is an integer from 2 to 12,

wherein R^{7a}, R^{7b} and a are each selected such that R¹ and R² each independently comprise from 6 to 20 carbon atoms. For example, in some embodiments a is an integer ranging from 5 to 9 or from 8 to 12.

[0812] In some of the foregoing embodiments of structure (VIII), at least one occurrence of R^{7a} is H. For example, in some embodiments, R^{7a} is H at each occurrence. In other different embodiments of the foregoing, at least one occurrence of R^{7b} is C₁-C₈ alkyl. For example, in some embodiments, C₁-C₈ alkyl is methyl, ethyl, n-propyl, iso-propyl, n-butyl, iso-butyl, tert-butyl, n-hexyl or n-octyl.

[0813] In some of the foregoing embodiments of structure (VIII), X is CR, Y is NR and R³ is C₁-C₁₂ alkyl, such as ethyl, propyl or butyl. In some of these embodiments, R¹ and R² are each independently branched C₆-C₂₄ alkyl.

[0814] In different embodiments of structure (VIII), R¹, R² and R³ each, independently have one of the following structures:

[chemical structure]

[chemical structure]

[0815] In certain embodiments of structure (VIII), R¹ and R² and R³ are each, independently, branched C₆-C₂₄ alkyl and R³ is C₁-C₂₄ alkyl or C₂-C₂₄ alkenyl.

[0816] In some of the foregoing embodiments of structure (VIII), R^{b}, R^{c}, R^{e} and R^{f} are each independently C₃-C₁₂ alkyl. For example, in some embodiments R^{b}, R^{c}, R^{e} and R^{f} are n-hexyl and in other embodiments R^{b}, R^{c}, R^{e} and R^{f} are n-octyl.

[0817] In various different embodiments of structure (VIII), the compound has one of the structures set forth in Table 7 below.

TABLE 7
Representative cationic lipids of structure (VIII)

| No. | Structure |
|---|---|
| VIII-1 | [chemical structure] |
| VIII-2 | [chemical structure] |
| VIII-3 | [chemical structure] |
| VIII-4 | [chemical structure] |
| VIII-5 | [chemical structure] |
| VIII-6 | [chemical structure] |
| VIII-7 | [chemical structure] |
| VIII-8 | [chemical structure] |
| VIII-9 | [chemical structure] |
| VIII-10 | [chemical structure] |
| VIII-11 | [chemical structure] |
| VIII-12 | [chemical structure] |

[0818] In one embodiment, the cationic lipid is a compound having the following structure (IX):

[chemical structure]

or a pharmaceutically acceptable salt, prodrug or stereoisomer thereof, wherein:

[0819] L¹ is —O(C═O)R¹, —(C═O)OR¹, —C(═O)R¹, —OR¹, —S(O)ₓR¹, —S—SR¹, —C(═O)SR¹, —SC(═O)R¹, —NR^{a}C(═O)R¹, —C(═O)NR^{b}R^{c}, —NR^{a}C(═O)NR^{b}R^{c}, —OC(═O)NR^{b}R^{c} or —NR^{a}C(═O)OR¹;

[0820] L² is —O(C═O)R², —(C═O)OR², —C(═O)R², —OR², —S(O)ₓR², —S—SR², —C(═O)SR², —SC(═O)R², —NR^{d}C(═O)R², —C(═O)NR^{e}R^{f}, —NR^{d}C(═O)NR^{e}R^{f}, —OC(═O)NR^{e}R^{f}, —NR^{d}C(═O)OR² or a direct bond to R²;

[0821] G¹ and G² are each independently C₂-C₁₂ alkylene or C₂-C₁₂ alkenylene;

[0822] G³ is C₁-C₂₄ alkylene, C₂-C₂₄ alkenylene, C₃-C₈ cycloalkylene or C₃-C₈ cycloalkenylene;

[0823] R^{a}, R^{b}, R^{d} and R^{e} are each independently H or C₁-C₁₂ alkyl or C₁-C₁₂ alkenyl;

[0824] R^{c} and R^{f} are each independently C₁-C₁₂ alkyl or C₂-C₁₂ alkenyl;

[0825] R¹ and R² are each independently branched C₆-C₂₄ alkyl or branched C₆-C₂₄ alkenyl;

[0826] R³ is —N(R⁴)R⁵;

[0827] R⁴ is C₁-C₁₂ alkyl;

[0828] R⁵ is substituted C₁-C₁₂ alkyl; and

[0829] x is 0, 1 or 2, and

wherein each alkyl, alkenyl, alkylene, alkenylene, cycloalkylene, cycloalkenylene, aryl and aralkyl is independently substituted or unsubstituted unless otherwise specified.

[0830] In certain embodiments of structure (XI), G³ is unsubstituted. In more specific embodiments G³ is C₂-C₁₂ alkylene, for example, in some embodiments G³ is C₃-C₇ alkylene or in other embodiments G³ is C₃-C₁₂ alkylene. In some embodiments, G³ is C₂ or C₃ alkylene.

[0831] In some of the foregoing embodiments of structure (IX), the compound has the following structure (IX A):

[chemical structure]

wherein y and z are each independently integers ranging from 2 to 12, for example an integer from 2 to 6, from 4 to 10, or for example 4 or 5. In certain embodiments, y and z are each the same and selected from 4, 5, 6, 7, 8 and 9.

[0832] In some of the foregoing embodiments of structure (IX), L¹ is —O(C═O)R¹, —(C═O)OR¹ or —C(═O)NR^{b}R^{c}, and L² is —O(C═O)R², —(C═O)OR² or —C(═O)NR^{e}R^{f}. For example, in some embodiments L¹ and L² are —(C═O)OR¹ and —(C═O)OR², respectively. In other embodiments L¹ is —(C═O)OR¹ and L² is —C(═O)NR^{e}R^{f}. In other embodiments L¹ is

—C(═O)NR^{b}R^{c} and L² is —C(═O)NR^{e}R^{f}.

[0833] In other embodiments of the foregoing, the compound has one of the following structures (IXB), (IXC), (IXD) or (IXE):

[chemical structure]

[0834] In some of the foregoing embodiments, the compound has structure (IXB), in other embodiments, the compound has structure (IXC) and in still other embodiments the compound has the structure (IXD). In other embodiments, the compound has structure (IXE).

[0835] In some different embodiments of the foregoing, the compound has one of the following structures (IXF), (IXG), (IXH) or (IXJ):

[chemical structure]

wherein y and z are each independently integers ranging from 2 to 12, for example an integer from 2 to 6, for example 4.

[0836] In some of the foregoing embodiments of structure (IX), y and z are each independently an integer ranging from 2 to 10, 2 to 8, from 4 to 10 or from 4 to 7. For example, in some embodiments, y is 4, 5, 6, 7, 8, 9, 10, 11 or 12. In some embodiments, z is 4, 5, 6, 7, 8, 9, 10, 11 or 12. In some embodiments, y and z are the same, while in other embodiments y and z are different.

[0837] In some of the foregoing embodiments of structure (IX), R¹ or R², or both is branched C₆-C₂₄ alkyl. For example, in some embodiments, R¹ and R² each, independently have the following structure:

[chemical structure]

wherein:

[0838] R^{7a} and R^{7b} are, at each occurrence, independently H or C₁-C₁₂ alkyl; and

[0839] a is an integer from 2 to 12,

wherein R^{7a}, R^{7b} and a are each selected such that R¹ and R² each independently comprise from 6 to 20 carbon atoms. For example, in some embodiments a is an integer ranging from 5 to 9 or from 8 to 12.

[0840] In some of the foregoing embodiments of structure (IX), at least one occurrence of R^{7a} is H. For example, in some embodiments, R^{7a} is H at each occurrence. In other different embodiments of the foregoing, at least one occurrence of R^{7b} is C₁-C₈ alkyl. For example, in some embodiments, C₁-C₈ alkyl is methyl, ethyl, n-propyl, iso-propyl, n-butyl, iso-butyl, tert-butyl, n-hexyl or n-octyl.

[0841] In different embodiments of structure (IX), R¹ or R², or both, has one of the following structures:

[chemical structure]

[0842] In some of the foregoing embodiments of structure (IX), R^{b}, R^{c}, R^{e} and R^{f} are each independently C₃-C₁₂ alkyl. For example, in some embodiments R^{b}, R^{c}, R^{e} and R^{f} are n-hexyl and in other embodiments R^{b}, R^{c}, R^{e} and R^{f} are n-octyl.

[0843] In any of the foregoing embodiments of structure (IX), R⁴ is substituted or unsubstituted: methyl, ethyl, propyl, n-butyl, n-hexyl, n-octyl or n-nonyl. For example, in some embodiments R⁴ is unsubstituted. In other R⁴ is substituted with one or more substituents selected from the group consisting of —OR⁸, —NR^{g}C(═O)R^{h}, —C(═O)NR^{g}R^{h}, —C(═O)R^{h}, —OC(═O)R^{h}, —C(═O)OR^{h} and —ORⁱOH, wherein:

[0844] R^{g} is, at each occurrence independently H or C₁-C₆ alkyl;

[0845] R^{h} is at each occurrence independently C₁-C₆ alkyl; and

[0846] Rⁱ is, at each occurrence independently C₁-C₆ alkylene.

[0847] In other of the foregoing embodiments of structure (IX), R⁵ is substituted: methyl, ethyl, propyl, n-butyl, n-hexyl, n-octyl or n-nonyl. In some embodiments, R⁵ is substituted ethyl or substituted propyl. In other different embodiments, R⁵ is substituted with hydroxyl. In still more embodiments, R⁵ is substituted with one or more substituents selected from the group consisting of —OR^{g}, —NR^{g}C(═O)R^{h}, —C(O)NR^{g}R^{h}, —C(═O)R^{h}, —OC(═O)R^{h}, —C(═O)OR^{h} and —ORⁱOH, wherein:

[0848] R^{g} is, at each occurrence independently H or C₁-C₆ alkyl;

[0849] R^{h} is at each occurrence independently C₁-C₆ alkyl; and

[0850] Rⁱ is, at each occurrence independently C₁-C₆ alkylene.

[0851] In other embodiments of structure (IX), R⁴ is unsubstituted methyl, and R⁵ is substituted: methyl, ethyl, propyl, n-butyl, n-hexyl, n-octyl or n-nonyl. In some of these embodiments, R⁵ is substituted with hydroxyl.

[0852] In some other specific embodiments of structure (IX), R³ has one of the following structures:

[chemical structure]

[0853] In various different embodiments of structure (IX), the cationic lipid has one of the structures set forth in Table 8 below.

TABLE 8
Representative cationic lipids of structure (IX)

| No. | Structure |
|---|---|
| IX-1 | [chemical structure] |
| IX-2 | [chemical structure] |
| IX-3 | [chemical structure] |
| IX-4 | [chemical structure] |
| IX-5 | [chemical structure] |
| IX-6 | [chemical structure] |
| IX-7 | [chemical structure] |
| IX-8 | [chemical structure] |
| IX-9 | [chemical structure] |
| IX-10 | [chemical structure] |
| IX-11 | [chemical structure] |
| IX-12 | [chemical structure] |
| IX-13 | [chemical structure] |
| IX-14 | [chemical structure] |
| IX-15 | [chemical structure] |
| IX-16 | [chemical structure] |
| IX-17 | [chemical structure] |
| IX-18 | [chemical structure] |

[0854] In one embodiment, the cationic lipid is a compound having the following structure (X):

[chemical structure]

or a pharmaceutically acceptable salt, tautomer, prodrug or stereoisomer thereof, wherein:

[0855] G¹ is —OH, —NR³R⁴, —(C═O)NR⁵ or —NR³(C═O)R⁵;

[0856] G² is —CH₂— or —(C═O)—;

[0857] R is, at each occurrence, independently H or OH;

[0858] R¹ and R² are each independently branched, saturated or unsaturated C₁₂-C₃₆ alkyl;

[0859] R³ and R⁴ are each independently H or straight or branched, saturated or unsaturated C₁-C₆ alkyl;

[0860] R⁵ is straight or branched, saturated or unsaturated C₁-C₆ alkyl; and

[0861] n is an integer from 2 to 6.

[0862] In some embodiments, R¹ and R² are each independently branched, saturated or unsaturated C₁₂-C₃₀ alkyl, C₁₂-C₂₀ alkyl, or C₁₅-C₂₀ alkyl. In some specific embodiments, R¹ and R² are each saturated. In certain embodiments, at least one of R¹ and R² is unsaturated.

[0863] In some of the foregoing embodiments of structure (X), R¹ and R² have the following structure:

[chemical structure]

[0864] In some of the foregoing embodiments of structure (X), the compound has the following structure (XA):

[chemical structure]

wherein:

[0865] R⁶ and R⁷ are, at each occurrence, independently H or straight or branched, saturated or unsaturated C₁-C₁₄ alkyl;

[0866] a and b are each independently an integer ranging from 1 to 15,

[0867] provided that R⁶ and a, and R⁷ and b, are each independently selected such that R¹ and R², respectively, are each independently branched, saturated or unsaturated C₁₂-C₃₆ alkyl.

[0868] In some of the foregoing embodiments, the compound has the following structure (XB):

[chemical structure]

wherein:

[0869] R⁸, R⁹, R¹⁰ and R¹¹ are each independently straight or branched, saturated or unsaturated C₄-C₁₂ alkyl, provided that R⁸ and R⁹, and R¹⁰ and R¹¹, are each independently selected such that R¹ and R², respectively, are each independently branched, saturated or unsaturated C₁₂-C₃₆ alkyl. In some embodiments of (XB), R⁸, R⁹, R¹⁰ and R¹¹ are each independently straight or branched, saturated or unsaturated C₆-C₁₀ alkyl. In certain embodiments of (XB), at least one of R⁸, R⁹, R¹⁰ and R¹¹ is unsaturated. In other certain specific embodiments of (XB), each of R₈, R⁹, R¹⁰ and R¹¹ is saturated.

[0870] In some of the foregoing embodiments, the compound has structure (XA), and in other embodiments, the compound has structure (XB).

[0871] In some of the foregoing embodiments, G¹ is —OH, and in some embodiments G¹ is —NR³R⁴. For example, in some embodiments, G¹ is —NH₂, —NHCH₃ or —N(CH₃)₂. In certain embodiments, G¹ is —(C═O)NR⁵. In certain other embodiments, G¹ is —NR³(C═O)R⁵. For example, in some embodiments G¹ is —NH(C═O)CH₃ or —NH(C═O)CH₂CH₂CH₃.

[0872] In some of the foregoing embodiments of structure (X), G² is —CH₂—. In some different embodiments, G² is —(C═O)—.

[0873] In some of the foregoing embodiments of structure (X), n is an integer ranging from 2 to 6, for example, in some embodiments n is 2, 3, 4, 5 or 6. In some embodiments, n is 2. In some embodiments, n is 3. In some embodiments, n is 4.

[0874] In certain of the foregoing embodiments of structure (X), at least one of R¹, R², R³, R⁴ and R⁵ is unsubstituted. For example, in some embodiments, R¹, R², R³, R⁴ and R⁵ are each unsubstituted. In some embodiments, R³ is substituted. In other embodiments R⁴ is substituted. In still more embodiments, R⁵ is substituted. In certain specific embodiments, each of R³ and R⁴ are substituted. In some embodiments, a substituent on R³, R⁴ or R⁵ is hydroxyl. In certain embodiments, R³ and R⁴ are each substituted with hydroxyl.

[0875] In some of the foregoing embodiments of structure (X), at least one R is OH. In other embodiments, each R is H.

[0876] In various different embodiments of structure (X), the compound has one of the structures set forth in Table 9 below.

TABLE 9
Representative cationic lipids of structure (X)

| No. | Structure |
|---|---|
| X-1 | [chemical structure] |
| X-2 | [chemical structure] |
| X-3 | [chemical structure] |
| X-4 | [chemical structure] |
| X-5 | [chemical structure] |
| X-6 | [chemical structure] |
| X-7 | [chemical structure] |
| X-8 | [chemical structure] |
| X-9 | [chemical structure] |
| X-10 | [chemical structure] |
| X-11 | [chemical structure] |
| X-12 | [chemical structure] |
| X-13 | [chemical structure] |
| X-14 | [chemical structure] |
| X-15 | [chemical structure] |
| X-16 | [chemical structure] |
| X-17 | [chemical structure] |

[0877] In any of Embodiments 1, 2, 3, 4 or 5, the LNPs further comprise a neutral lipid. In various embodiments, the molar ratio of the cationic lipid to the neutral lipid ranges from about 2:1 to about 8:1. In certain embodiments, the neutral lipid is present in any of the foregoing LNPs in a concentration ranging from 5 to 10 mol percent, from 5 to 15 mol percent, 7 to 13 mol percent, or 9 to 11 mol percent. In certain specific embodiments, the neutral lipid is present in a concentration of about 9.5, 10 or 10.5 mol percent. In some embodiments, the molar ratio of cationic lipid to the neutral lipid ranges from about 4.1:1.0 to about 4.9:1.0, from about 4.5:1.0 to about 4.8:1.0, or from about 4.7:1.0 to 4.8:1.0. In some embodiments, the molar ratio of total cationic lipid to the neutral lipid ranges from about 4.1:1.0 to about 4.9:1.0, from about 4.5:1.0 to about 4.8:1.0, or from about 4.7:1.0 to 4.8:1.0.

[0878] Exemplary neutral lipids for use in any of Embodiments 1, 2, 3, 4 or 5 include, for example, distearoylphosphatidylcholine (DSPC), dioleoylphosphatidylcholine (DOPC), dipalmitoylphosphatidylcholine (DPPC), dioleoylphosphatidylglycerol (DOPG), dipalmitoylphosphatidylglycerol (DPPG), dioleoyl-phosphatidylethanolamine (DOPE), palmitoyloleoylphosphatidylcholine (POPC), palmitoyloleoyl-phosphatidylethanolamine (POPE) and dioleoyl-phosphatidylethanolamine 4-(N-maleimidomethyl)-cyclohexane-1carboxylate (DOPE-mal), dipalmitoyl phosphatidyl ethanolamine (DPPE), dimyristoylphosphoethanolamine (DMPE), distearoyl-phosphatidylethanolamine (DSPE), 16-O-monomethyl PE, 16-O-dimethyl PE, 18-1-trans PE, 1-stearioyl-2-oleoylphosphatidyethanol amine (SOPE), and 1,2-dielaidoyl-sn-glycero-3-phophoethanolamine (transDOPE). In one embodiment, the neutral lipid is 1,2-distearoyl-sn-glycero-3phosphocholine (DSPC). In some embodiments, the neutral lipid is selected from DSPC, DPPC, DMPC, DOPC, POPC, DOPE and SM. In some embodiments, the neutral lipid is DSPC.

[0879] In various embodiments of Embodiments 1, 2, 3, 4 or 5, any of the disclosed lipid nanoparticles comprise a steroid or steroid analogue. In certain embodiments, the steroid or steroid analogue is cholesterol. In some embodiments, the steroid is present in a concentration ranging from 39 to 49 molar percent, 40 to 46 molar percent, from 40 to 44 molar percent, from 40 to 42 molar percent, from 42 to 44 molar percent, or from 44 to 46 molar percent. In certain specific embodiments, the steroid is present in a concentration of 40, 41, 42, 43, 44, 45, or 46 molar percent.

[0880] In certain embodiments, the molar ratio of cationic lipid to the steroid ranges from 1.0:0.9 to 1.0:1.2, or from 1.0:1.0 to 1.0:1.2. In some of these embodiments, the molar ratio of cationic lipid to cholesterol ranges from about 5:1 to 1:1. In certain embodiments, the steroid is present in a concentration ranging from 32 to 40 mol percent of the steroid.

[0881] In certain embodiments, the molar ratio of total cationic to the steroid ranges from 1.0:0.9 to 1.0:1.2, or from 1.0:1.0 to 1.0:1.2. In some of these embodiments, the molar ratio of total cationic lipid to cholesterol ranges from about 5:1 to 1:1. In certain embodiments, the steroid is present in a concentration ranging from 32 to 40 mol percent of the steroid.

[0882] In some embodiments of Embodiments 1, 2, 3 4 or 5, the LNPs further comprise a polymer conjugated lipid. In various other embodiments of Embodiments 1, 2, 3 4 or 5, the polymer conjugated lipid is a pegylated lipid. For example, some embodiments include a pegylated diacylglycerol (PEG-DAG) such as 1-(monomethoxy-polyethyleneglycol)-2,3-dimyristoylglycerol (PEG-DMG), a pegylated phosphatidylethanoloamine (PEG-PE), a PEG succinate diacylglycerol (PEG-S-DAG) such as 4-O-(2′,3′-di(tetradecanoyloxy)propyl-1-O-(ω-methoxy(polyethoxy)ethyl)butanedioate (PEG-S-DMG), a pegylated ceramide (PEG-cer), or a PEG dialkoxypropylcarbamate such as ω-methoxy(polyethoxy)ethyl-N-(2,3-di(tetradecanoxy)propyl)carbamate or 2,3-di(tetradecanoxy)propyl-N-(ω-methoxy(polyethoxy)ethyl)carbamate.

[0883] In various embodiments, the polymer conjugated lipid is present in a concentration ranging from 1.0 to 2.5 molar percent. In certain specific embodiments, the polymer conjugated lipid is present in a concentration of about 1.7 molar percent. In some embodiments, the polymer conjugated lipid is present in a concentration of about 1.5 molar percent.

[0884] In certain embodiments, the molar ratio of cationic lipid to the polymer conjugated lipid ranges from about 35:1 to about 25:1. In some embodiments, the molar ratio of cationic lipid to polymer conjugated lipid ranges from about 100:1 to about 20:1.

[0885] In certain embodiments, the molar ratio of total cationic lipid (i.e., the sum of the first and second cationic lipid) to the polymer conjugated lipid ranges from about 35:1 to about 25:1. In some embodiments, the molar ratio of total cationic lipid to polymer conjugated lipid ranges from about 100:1 to about 20:1.

[0886] In some embodiments of Embodiments 1, 2, 3 4 or 5, the pegylated lipid, when present, has the following Formula (XI):

[chemical structure]

[0887] or a pharmaceutically acceptable salt, tautomer or stereoisomer thereof, wherein:

[0888] R¹² and R¹³ are each independently a straight or branched, saturated or unsaturated alkyl chain containing from 10 to 30 carbon atoms, wherein the alkyl chain is optionally interrupted by one or more ester bonds; and

[0889] w has a mean value ranging from 30 to 60.

[0890] In some embodiments, R¹² and R¹³ are each independently straight, saturated alkyl chains containing from 12 to 16 carbon atoms. In other embodiments, the average w ranges from 42 to 55, for example, the average w is 42, 43, 44, 45, 46, 47, 48, 49, 50, 51, 52, 53, 54 or 55. In some specific embodiments, the average w is about 49.

[0891] In some embodiments, the pegylated lipid has the following Formula (XIa):

[chemical structure]

wherein the average w is about 49.

[0892] In some embodiments of Embodiments 1, 2, 3 4 or 5, the nucleic acid is selected from antisense and messenger RNA. For example, messenger RNA may be used to induce an immune response (e.g., as a vaccine), for example by translation of immunogenic proteins.

[0893] In other embodiments of Embodiments 1, 2, 3 4 or 5, the nucleic acid is mRNA, and the mRNA to lipid ratio in the LNP (i.e., N/P, were N represents the moles of cationic lipid and P represents the moles of phosphate present as part of the nucleic

[0894] In an embodiment, the transfer vehicle comprises a lipid or an ionizable lipid described in US patent publication number 20190314524.

[0895] Some embodiments of the present invention provide nucleic acid-lipid nanoparticle compositions comprising one or more of the novel cationic lipids described herein as structures listed in Table 10, that provide increased activity of the nucleic acid and improved tolerability of the compositions in vivo.

[0896] In one embodiment, an ionizable lipid has the following structure (XII):

[chemical structure]

or a pharmaceutically acceptable salt, tautomer, prodrug or stereoisomer thereof, wherein:

[0897] one of L¹ or L² is —O(C═O)—, —(C═O)O—, —C(═O)—, —O—, —S(O)ₓ—, —S—S—, —C(═O)S—, SC(═O)—, —NR^{a}C(═O)—, —C(═O)NR^{a}—, NR^{a}C(═O)NR^{a}—, —OC(═O)NR^{a}+ or —NR^{a}C(═O)O—, and the other of L¹ or L² is —O(C═O)—, —(C═O)O—, —C(═O)—, —O—, —S(O)ₓ—, —S—S—, —C(═O)S—, SC(═O)—, —NR^{a}C(═O)—, —C(═O)NR^{a}—, NR^{a}C(═O)NR^{a}—, —OC(═O)NR^{a}— or —NR^{a}C(═O)O— or a direct bond;

[0898] G¹ and G² are each independently unsubstituted C₁-C₁₂ alkylene or C₁-C₁₂ alkenylene;

[0899] G³ is C₁-C₂₄ alkylene, C₁-C₂₄ alkenylene, C₃-C₈ cycloalkylene, C₃-C₈ cycloalkenylene;

[0900] R^{a} is H or C₁-C₁₂ alkyl;

[0901] R¹ and R² are each independently C₆-C₂₄ alkyl or C₆-C₂₄ alkenyl;

[0902] R³ is H, OR⁵, CN, —C(═O)OR⁴, —OC(═O)R⁴ or —NR⁵C(═O)R⁴;

[0903] R⁴ is C₁-C₁₂alkyl;

[0904] R⁵ is H or C₁-C₆ alkyl; and

[0905] x is 0, 1 or 2.

[0906] In some embodiments, an ionizable lipid has one of the following structures (XIIA) or (XIIB):

[chemical structure]

wherein:

[0907] A is a 3 to 8-membered cycloalkyl or cycloalkylene ring;

[0908] R⁶ is, at each occurrence, independently H, OH or C₁-C₂₄ alkyl; and

[0909] n is an integer ranging from 1 to 15.

[0910] In some embodiments, the ionizable lipid has structure (XIIA), and in other embodiments, the ionizable lipid has structure (XIIB).

[0911] In other embodiments, an ionizable lipid has one of the following structures (XIIC) or (XIID):

[chemical structure]

wherein y and z are each independently integers ranging from 1 to 12.

[0912] In some embodiments, one of L¹ or L² is —O(C═O)—. For example, in some embodiments each of L¹ and L² are —O(C═O)—. In some different embodiments of any of the foregoing, L¹ and L² are each independently —(C═O)O— or —O(C═O)—. For example, in some embodiments each of L¹ and L² is —(C═O)O—.

[0913] In some embodiments, an ionizable lipid has one of the following structures (XIIE) or (XIIF):

[chemical structure]

[0914] In some embodiments, an ionizable lipid has one of the following structures (XIIG), (XIIH), (XIII), or (XIIJ):

[chemical structure]

[0915] In some embodiments, n is an integer ranging from 2 to 12, for example from 2 to 8 or from 2 to 4. For example, in some embodiments, n is 3, 4, 5 or 6. In some embodiments, n is 3. In some embodiments, n is 4. In some embodiments, n is 5. In some embodiments, n is 6.

[0916] In some embodiments, y and z are each independently an integer ranging from 2 to 10. For example, in some embodiments, y and z are each independently an integer ranging from 4 to 9 or from 4 to 6.

[0917] In some embodiments, R⁶ is H. In other embodiments, R⁶ is C₁-C₂₄ alkyl. In other embodiments, R⁶ is OH.

[0918] In some embodiments, G³ is unsubstituted. In other embodiments, G3 is substituted. In various different embodiments, G³ is linear C₁-C₂₄ alkylene or linear C₁-C₂₄ alkenylene.

[0919] In some embodiments, R¹ or R², or both, is C₆-C₂₄ alkenyl. For example, in some embodiments, R¹ and R² each, independently have the following structure:

[chemical structure]

wherein:

[0920] R^{7a} and R^{7b} are, at each occurrence, independently H or C₁-C₁₂ alkyl; and

[0921] a is an integer from 2 to 12,

[0922] wherein R^{7a}, R^{7b} and a are each selected such that R¹ and R² each independently comprise from 6 to 20 carbon atoms.

[0923] In some embodiments, a is an integer ranging from 5 to 9 or from 8 to 12.

[0924] In some embodiments, at least one occurrence of R^{7a} is H. For example, in some embodiments, R^{7a} is H at each occurrence. In other different embodiments, at least one occurrence of R^{7b} is C₁-C₈ alkyl. For example, in some embodiments, C₁-C₈ alkyl is methyl, ethyl, n-propyl, iso-propyl, n-butyl, iso-butyl, tert-butyl, n-hexyl or n-octyl.

[0925] In different embodiments, R¹ or R², or both, has one of the following structures:

[chemical structure]

[0926] In some embodiments, R³ is —OH, —CN, —C(═O)OR⁴, —OC(═O)R⁴ or —NHC(═O)R⁴. In some embodiments, R⁴ is methyl or ethyl.

[0927] In some embodiments, an ionizable lipid is a compound of Formula (1):

[chemical structure]

wherein:

[0928] each n is independently 1, 2, 3, 4, 5, 6, 7, 8, 9, 10, 11, 12, 13, 14, or 15; and

[0929] L₁ and L₃ are each independently —OC(O)—* or —C(O)O—*, wherein “*” indicates the attachment point to R₁ or R₃;

[0930] R₁ and R₃ are each independently a linear or branched C₉-C₂₀ alkyl or C₉-C₂₀ alkenyl, optionally substituted by one or more substituents selected from oxo, halo, hydroxy, cyano, alkyl, alkenyl, aldehyde, heterocyclylalkyl, hydroxyalkyl, dihydroxyalkyl, hydroxyalkylaminoalkyl, aminoalkyl, alkylaminoalkyl, dialkylaminoalkyl, (heterocyclyl)(alkyl)aminoalkyl, heterocyclyl, heteroaryl, alkylheteroaryl, alkynyl, alkoxy, amino, dialkylamino, aminoalkylcarbonylamino, aminocarbonylalkylamino, (aminocarbonylalkyl)(alkyl)amino, alkenylcarbonylamino, hydroxycarbonyl, alkyloxycarbonyl, aminocarbonyl, aminoalkylaminocarbonyl, alkylaminoalkylaminocarbonyl, dialkylaminoalkylaminocarbonyl, heterocyclylalkylaminocarbonyl, (alkylaminoalkyl)(alkyl)amino carbonyl, alkylaminoalkylcarbonyl, dialkylaminoalkylcarbonyl, heterocyclylcarbonyl, alkenylcarbonyl, alkynylcarbonyl, alkylsulfoxide, alkylsulfoxidealkyl, alkylsulfonyl, and alkylsulfonealkyl.

[0931] In some embodiments, R₁ and R₃ are the same. In some embodiments, R₁ and R₃ are different.

[0932] In some embodiments, R₁ and R₃ are each independently a branched saturated C₉-C₂₀alkyl. In some embodiments, one of R₁ and R₃ is a branched saturated C₉-C₂₀ alkyl, and the other is an unbranched saturated C₉-C₂₀ alkyl. In some embodiments, R₁ and R₃ are each independently selected from a group consisting of:

[chemical structure]

[0933] In various embodiments, R₂ is selected from a group consisting of:

[chemical structure]

[chemical structure]

[0934] In some embodiments, R₂ may be as described in International Pat. Pub. No. WO2019/152848 A 1, which is incorporated herein by reference in its entirety.

[0935] In some embodiments, an ionizable lipid is a compound of Formula (1-1) or Formula (1-2):

[chemical structure]

wherein n, R₁, R₂, and R₃ are as defined in Formula (1).

[0936] Preparation methods for the above compounds and compositions are described herein below and/or known in the art.

[0937] It will be appreciated by those skilled in the art that in the process described herein the functional groups of intermediate compounds may need to be protected by suitable protecting groups. Such functional groups include, e.g., hydroxyl, amino, mercapto, and carboxylic acid. Suitable protecting groups for hydroxyl include, e.g., trialkylsilyl or diarylalkylsilyl (for example, t-butyldimethylsilyl, t-butyldiphenylsilyl or trimethylsilyl), tetrahydropyranyl, benzyl, and the like. Suitable protecting groups for amino, amidino, and guanidine include, e.g., t-butoxycarbonyl, benzyloxycarbonyl, and the like. Suitable protecting groups for mercapto include, e.g., —C(O)—R″ (where R″ is alkyl, aryl, or arylalkyl), p-methoxybenzyl, trityl, and the like. Suitable protecting groups for carboxylic acid include, e.g., alkyl, aryl, or arylalkyl esters. Protecting groups may be added or removed in accordance with standard techniques, which are known to one skilled in the art and as described herein. The use of protecting groups is described in detail in, e.g., Green, T. W. and P. G. M. Wutz, Protective Groups in Organic Synthesis (1999), 3rd Ed., Wiley. As one of skill in the art would appreciate, the protecting group may also be a polymer resin such as a Wang resin, Rink resin, or a 2-chlorotrityl-chloride resin.

[0938] It will also be appreciated by those skilled in the art, although such protected derivatives of compounds of this invention may not possess pharmacological activity as such, they may be administered to a mammal and thereafter metabolized in the body to form compounds of the invention which are pharmacologically active. Such derivatives may therefore be described as prodrugs. All prodrugs of compounds of this invention are included within the scope of the invention.

[0939] Furthermore, all compounds of the invention which exist in free base or acid form can be converted to their pharmaceutically acceptable salts by treatment with the appropriate inorganic or organic base or acid by methods known to one skilled in the art. Salts of the compounds of the invention can also be converted to their free base or acid form by standard techniques.

[0940] The following reaction scheme illustrates an exemplary method to make compounds of Formula (1):

[chemical structure]

[0941] A1 are purchased or prepared according to methods known in the art. Reaction of A1 with diol A2 under appropriate condensation conditions (e.g., DCC) yields ester/alcohol A3, which can then be oxidized (e.g., with PCC) to aldehyde A4. Reaction of A4 with amine A5 under reductive amination conditions yields a compound of Formula (1).

[0942] The following reaction scheme illustrates a second exemplary method to make compounds of Formula (1), wherein R₁ and R₃ are the same:

[chemical structure]

[0943] Modifications to the above reaction scheme, such as using protecting groups, may yield compounds wherein R₁ and R₃ are different. The use of protecting groups, as well as other modification methods, to the above reaction scheme will be readily apparent to one of ordinary skill in the art.

[0944] It is understood that one skilled in the art may be able to make these compounds by similar methods or by combining other methods known to one skilled in the art. It is also understood that one skilled in the art would be able to make other compounds of Formula (1) not specifically illustrated herein by using the appropriate starting materials and modifying the parameters of the synthesis. In general, starting materials may be obtained from sources such as Sigma Aldrich, Lancaster Synthesis, Inc., Maybridge, Matrix Scientific, TCI, and Fluorochem USA, etc. or synthesized according to sources known to those skilled in the art (see, e.g., Advanced Organic Chemistry: Reactions, Mechanisms, and Structure, 5th edition (Wiley, December 2000)) or prepared as described in this invention.

[0945] In some embodiments, an ionizable lipid is a compound of Formula (2):

[chemical structure]

wherein each n is independently 1, 2, 3, 4, 5, 6, 7, 8, 9, 10, 11, 12, 13, 14, or 15.

[0946] In some embodiments, as used in Formula (2), R₁ and R₂ are as defined in Formula (1).

[0947] In some embodiments, as used in Formula (2), R₁ and R₂ are each independently selected from a group consisting of:

[chemical structure]

[chemical structure]

[chemical structure]

[0948] In some embodiments, R₁ and/or R₂ as used in Formula (2) may be as described in International Pat. Pub. No. WO2015/095340 A 1, which is incorporated herein by reference in its entirety. In some embodiments, R₁ as used in Formula (2) may be as described in International Pat. Pub. No. WO2019/152557 A 1, which is incorporated herein by reference in its entirety.

[0949] In some embodiments, as used in Formula (2), R₃ is selected from a group consisting of:

[chemical structure]

[0950] In some embodiments, an ionizable lipid is a compound of Formula (3)

[chemical structure]

wherein X is selected from —O—, —S—, or —OC(O)—*, wherein * indicates the attachment point to R₁.

[0951] In some embodiments, an ionizable lipid is a compound of Formula (3-1):

[chemical structure]

[0952] In some embodiments, an ionizable lipid is a compound of Formula (3-2):

[chemical structure]

[0953] In some embodiments, an ionizable lipid is a compound of Formula (3-3):

[chemical structure]

[0954] In some embodiments, as used in Formula (3-1), (3-2), or (3-3), each R₁ is independently a branched saturated C₉-C₂₀ alkyl. In some embodiments, each R₁ is independently selected from a group consisting of:

[chemical structure]

[0955] In some embodiments, each R₁ in Formula (3-1), (3-2), or (3-3) are the same.

[0956] In some embodiments, as used in Formula (3-1), (3-2), or (3-3), R₂ is selected from a group consisting of:

[chemical structure]

[chemical structure]

[0957] In some embodiments, R₂ as used in Formula (3-1), (3-2), or (3-3) may be as described in International Pat. Pub. No. WO2019/152848A1, which is incorporated herein by reference in its entirety.

[0958] In some embodiments, an ionizable lipid is a compound of Formula (5):

[chemical structure]

wherein:

[0959] each n is independently 1, 2, 3, 4, 5, 6, 7, 8, 9, 10, 11, 12, 13, 14, or 15; and

[0960] R₂ is as defined in Formula (1).

[0961] In some embodiments, as used in Formula (5), R₄ and R₅ are defined as R₁ and R₃, respectively, in Formula (1). In some embodiments, as used in Formula (5), R₄ and R₅ may be as described in International Pat. Pub. No. WO2019/191780 A1, which is incorporated herein by reference in its entirety.

[0962] In some embodiments, an ionizable lipid of the disclosure is selected from Table 10a. In some embodiments, the ionizable lipid is Lipid 26 in Table 10a. In some embodiments, the ionizable lipid is Lipid 27 in Table 10a. In some embodiments, the ionizable lipid is Lipid 53 in Table 10a. In some embodiments, the ionizable lipid is Lipid 54 in Table 10a.

[0963] In some embodiments, an ionizable lipid of the disclosure is selected from the group consisting of:

[chemical structure]

TABLE 10a

| Ioniz- | |
|---|---|
| able | |
| lipid | |
| num- | |
| ber | Structure |
| 1 | [chemical structure] |
| 2 | [chemical structure] |
| 3 | [chemical structure] |
| 4 | [chemical structure] |
| 5 | [chemical structure] |
| 6 | [chemical structure] |
| 7 | [chemical structure] |
| 8 | [chemical structure] |
| 9 | [chemical structure] |
| 10 | [chemical structure] |
| 11 | [chemical structure] |
| 12 | [chemical structure] |
| 13 | [chemical structure] |
| 14 | [chemical structure] |
| 15 | [chemical structure] |
| 16 | [chemical structure] |
| 17 | [chemical structure] |
| 18 | [chemical structure] |
| 19 | [chemical structure] |
| 20 | [chemical structure] |
| 21 | [chemical structure] |
| 22 | [chemical structure] |
| 23 | [chemical structure] |
| 24 | [chemical structure] |
| 25 | [chemical structure] |
| 26 | [chemical structure] |
| 27 | [chemical structure] |
| 28 | [chemical structure] |
| 29 | [chemical structure] |
| 30 | [chemical structure] |
| 31 | [chemical structure] |
| 32 | [chemical structure] |
| 33 | [chemical structure] |
| 34 | [chemical structure] |
| 35 | [chemical structure] |
| 36 | [chemical structure] |
| 37 | [chemical structure] |
| 38 | [chemical structure] |
| 39 | [chemical structure] |
| 40 | [chemical structure] |
| 41 | [chemical structure] |
| 42 | [chemical structure] |
| 43 | [chemical structure] |
| 44 | [chemical structure] |
| 45 | [chemical structure] |
| 46 | [chemical structure] |
| 47 | [chemical structure] |
| 48 | [chemical structure] |
| 49 | [chemical structure] |
| 50 | [chemical structure] |
| 51 | [chemical structure] |
| 52 | [chemical structure] |
| 53 | [chemical structure] |
| 54 | [chemical structure] |
| 55 | [chemical structure] |
| 56 | [chemical structure] |
| 57 | [chemical structure] |
| 58 | [chemical structure] |
| 59 | [chemical structure] |
| 60 | [chemical structure] |
| 61 | [chemical structure] |
| 62 | [chemical structure] |
| 63 | [chemical structure] |
| 64 | [chemical structure] |
| 65 | [chemical structure] |
| 66 | [chemical structure] |
| 67 | [chemical structure] |
| 68 | [chemical structure] |
| 69 | [chemical structure] |
| 70 | [chemical structure] |
| 71 | [chemical structure] |
| 72 | [chemical structure] |
| 73 | [chemical structure] |
| 74 | [chemical structure] |
| 75 | [chemical structure] |
| 76 | [chemical structure] |
| 77 | [chemical structure] |
| 78 | [chemical structure] |
| 79 | [chemical structure] |
| 80 | [chemical structure] |
| 81 | [chemical structure] |
| 82 | [chemical structure] |
| 83 | [chemical structure] |
| 84 | [chemical structure] |
| 85 | [chemical structure] |
| 86 | [chemical structure] |
| 87 | [chemical structure] |
| 88 | [chemical structure] |
| 89 | [chemical structure] |
| 90 | [chemical structure] |
| 91 | [chemical structure] |
| 92 | [chemical structure] |
| 93 | [chemical structure] |
| 94 | [chemical structure] |
| 95 | [chemical structure] |
| 96 | [chemical structure] |
| 97 | [chemical structure] |
| 98 | [chemical structure] |
| 99 | [chemical structure] |
| 100 | [chemical structure] |
| 101 | [chemical structure] |
| 102 | [chemical structure] |
| 103 | [chemical structure] |
| 104 | [chemical structure] |
| 105 | [chemical structure] |
| 106 | [chemical structure] |
| 107 | [chemical structure] |
| 108 | [chemical structure] |
| 109 | [chemical structure] |
| 110 | [chemical structure] |
| 111 | [chemical structure] |
| 112 | [chemical structure] |
| 113 | [chemical structure] |
| 114 | [chemical structure] |
| 115 | [chemical structure] |
| 116 | [chemical structure] |
| 117 | [chemical structure] |
| 118 | [chemical structure] |
| 119 | [chemical structure] |
| 120 | [chemical structure] |
| 121 | [chemical structure] |
| 122 | [chemical structure] |
| 123 | [chemical structure] |
| 124 | [chemical structure] |
| 125 | [chemical structure] |
| 126 | [chemical structure] |
| 127 | [chemical structure] |
| 128 | [chemical structure] |
| 129 | [chemical structure] |
| 130 | [chemical structure] |
| 131 | [chemical structure] |
| 132 | [chemical structure] |
| 133 | [chemical structure] |
| 134 | [chemical structure] |
| 135 | [chemical structure] |
| 136 | [chemical structure] |

[0964] In some embodiments, the ionizable lipid has a beta-hydroxyl amine head group. In some embodiments, the ionizable lipid has a gamma-hydroxyl amine head group.

[0965] In some embodiments, an ionizable lipid of the disclosure is a lipid selected from Table 10b. In some embodiments, an ionizable lipid of the disclosure is Lipid 15 from Table 10b. In an embodiment, the ionizable lipid is described in US patent publication number US20170210697A1. In an embodiment, the ionizable lipid is described in US patent publication number US20170119904A1.

TABLE 10b

| Ionizable | |
|---|---|
| lipid | |
| number | Structure |
| 1 | [chemical structure] |
| 2 | [chemical structure] |
| 3 | [chemical structure] |
| 4 | [chemical structure] |
| 5 | [chemical structure] |
| 6 | [chemical structure] |
| 7 | [chemical structure] |
| 8 | [chemical structure] |
| 9 | [chemical structure] |
| 10 | [chemical structure] |
| 11 | [chemical structure] |
| 12 | [chemical structure] |
| 13 | [chemical structure] |
| 14 | [chemical structure] |
| 15 | [chemical structure] |
| 16 | [chemical structure] |
| 17 | [chemical structure] |
| 18 | [chemical structure] |
| 19 | [chemical structure] |
| 20 | [chemical structure] |
| 21 | [chemical structure] |
| 22 | [chemical structure] |
| 23 | [chemical structure] |
| 24 | [chemical structure] |
| 25 | [chemical structure] |
| 26 | [chemical structure] |
| 27 | [chemical structure] |
| 28 | [chemical structure] |
| 29 | [chemical structure] |
| 30 | [chemical structure] |
| 31 | [chemical structure] |
| 32 | [chemical structure] |
| 33 | [chemical structure] |
| 34 | [chemical structure] |
| 35 | [chemical structure] |
| 36 | [chemical structure] |
| 37 | [chemical structure] |
| 38 | [chemical structure] |

[0966] In some embodiments, an ionizable lipid has one of the structures set forth in Table 10 below.

TABLE 10

| Num- | |
|---|---|
| ber | Structure |
| 1 | [chemical structure] |
| 2 | [chemical structure] |
| 3 | [chemical structure] |
| 4 | [chemical structure] |
| 5 | [chemical structure] |
| 6 | [chemical structure] |
| 7 | [chemical structure] |
| 8 | [chemical structure] |
| 9 | [chemical structure] |
| 10 | [chemical structure] |
| 11 | [chemical structure] |
| 12 | [chemical structure] |
| 13 | [chemical structure] |
| 14 | [chemical structure] |
| 15 | [chemical structure] |
| 16 | [chemical structure] |
| 17 | [chemical structure] |
| 18 | [chemical structure] |
| 19 | [chemical structure] |
| 20 | [chemical structure] |
| 21 | [chemical structure] |
| 22 | [chemical structure] |
| 23 | [chemical structure] |
| 24 | [chemical structure] |
| 25 | [chemical structure] |
| 26 | [chemical structure] |
| 27 | [chemical structure] |
| 28 | [chemical structure] |
| 29 | [chemical structure] |
| 30 | [chemical structure] |
| 31 | [chemical structure] |
| 32 | [chemical structure] |
| 33 | [chemical structure] |
| 34 | [chemical structure] |
| 35 | [chemical structure] |
| 36 | [chemical structure] |
| 37 | [chemical structure] |
| 38 | [chemical structure] |
| 39 | [chemical structure] |
| 40 | [chemical structure] |
| 41 | [chemical structure] |
| 42 | [chemical structure] |
| 43 | [chemical structure] |
| 44 | [chemical structure] |
| 45 | [chemical structure] |
| 46 | [chemical structure] |
| 47 | [chemical structure] |
| 48 | [chemical structure] |
| 49 | [chemical structure] |

[0967] In some embodiments, the ionizable lipid has one of the structures set forth in Table 11 below. In some embodiments, the ionizable lipid as set forth in Table 11 is as described in international patent application PCT/US2010/061058.

TABLE 11

[chemical structure]

[chemical structure]

[chemical structure]

[chemical structure]

[chemical structure]

[chemical structure]

[chemical structure]

[chemical structure]

[chemical structure]

[chemical structure]

[chemical structure]

[chemical structure]

[chemical structure]

[chemical structure]

[chemical structure]

[chemical structure]

[chemical structure]

[chemical structure]

[chemical structure]

[chemical structure]

[chemical structure]

[chemical structure]

[chemical structure]

[chemical structure]

[chemical structure]

[chemical structure]

[chemical structure]

[chemical structure]

[chemical structure]

[chemical structure]

[chemical structure]

[chemical structure]

[chemical structure]

[chemical structure]

[chemical structure]

[chemical structure]

[chemical structure]

[chemical structure]

[chemical structure]

[chemical structure]

[chemical structure]

[chemical structure]

[chemical structure]

[chemical structure]

[chemical structure]

[chemical structure]

[chemical structure]

[chemical structure]

[chemical structure]

[chemical structure]

[chemical structure]

[chemical structure]

[chemical structure]

[chemical structure]

[chemical structure]

[chemical structure]

[chemical structure]

[chemical structure]

[chemical structure]

[chemical structure]

[chemical structure]

[chemical structure]

[chemical structure]

[chemical structure]

[chemical structure]

[chemical structure]

[chemical structure]

[chemical structure]

[chemical structure]

[chemical structure]

[chemical structure]

[chemical structure]

[chemical structure]

[chemical structure]

[chemical structure]

[chemical structure]

[chemical structure]

[chemical structure]

[chemical structure]

[chemical structure]

[chemical structure]

[chemical structure]

[chemical structure]

[chemical structure]

[chemical structure]

[chemical structure]

[chemical structure]

[chemical structure]

[chemical structure]

[chemical structure]

[chemical structure]

[chemical structure]

[chemical structure]

[chemical structure]

[chemical structure]

[chemical structure]

[chemical structure]

[chemical structure]

[chemical structure]

[chemical structure]

[chemical structure]

[chemical structure]

[chemical structure]

[chemical structure]

[chemical structure]

[chemical structure]

[chemical structure]

[chemical structure]

[chemical structure]

[chemical structure]

[chemical structure]

[chemical structure]

[chemical structure]

[chemical structure]

[chemical structure]

[chemical structure]

[chemical structure]

[chemical structure]

[chemical structure]

[chemical structure]

[chemical structure]

[chemical structure]

[chemical structure]

[chemical structure]

[chemical structure]

[chemical structure]

[chemical structure]

[chemical structure]

[chemical structure]

[chemical structure]

[chemical structure]

[chemical structure]

[chemical structure]

[chemical structure]

[chemical structure]

[chemical structure]

[chemical structure]

[chemical structure]

[chemical structure]

[chemical structure]

[chemical structure]

[chemical structure]

[chemical structure]

[chemical structure]

[chemical structure]

[chemical structure]

[chemical structure]

[chemical structure]

[chemical structure]

[chemical structure]

[chemical structure]

[chemical structure]

[chemical structure]

[chemical structure]

[chemical structure]

[chemical structure]

[chemical structure]

[chemical structure]

[chemical structure]

[chemical structure]

[chemical structure]

[chemical structure]

[chemical structure]

[chemical structure]

[chemical structure]

[chemical structure]

[chemical structure]

[chemical structure]

[chemical structure]

[chemical structure]

[chemical structure]

[chemical structure]

[chemical structure]

[chemical structure]

[chemical structure]

[chemical structure]

[chemical structure]

[chemical structure]

[chemical structure]

[chemical structure]

[chemical structure]

[chemical structure]

[chemical structure]

[chemical structure]

[chemical structure]

[chemical structure]

[chemical structure]

[chemical structure]

[chemical structure]

[chemical structure]

[chemical structure]

[chemical structure]

[chemical structure]

[chemical structure]

[chemical structure]

[chemical structure]

[chemical structure]

[chemical structure]

[chemical structure]

[chemical structure]

[chemical structure]

[chemical structure]

[chemical structure]

[chemical structure]

[chemical structure]

[chemical structure]

[chemical structure]

[chemical structure]

[chemical structure]

[chemical structure]

[chemical structure]

[chemical structure]

[chemical structure]

[chemical structure]

[chemical structure]

[chemical structure]

[chemical structure]

[chemical structure]

[chemical structure]

[chemical structure]

[chemical structure]

[chemical structure]

[chemical structure]

[chemical structure]

[chemical structure]

[chemical structure]

[chemical structure]

[chemical structure]

[chemical structure]

[chemical structure]

[chemical structure]

[chemical structure]

[chemical structure]

[chemical structure]

[chemical structure]

[chemical structure]

[chemical structure]

[chemical structure]

[chemical structure]

[chemical structure]

[chemical structure]

[chemical structure]

[chemical structure]

[chemical structure]

[chemical structure]

[chemical structure]

[chemical structure]

[chemical structure]

[chemical structure]

[chemical structure]

[chemical structure]

[chemical structure]

[chemical structure]

[chemical structure]

[chemical structure]

[chemical structure]

[chemical structure]

[chemical structure]

[chemical structure]

[chemical structure]

[chemical structure]

[chemical structure]

[chemical structure]

[chemical structure]

[chemical structure]

[chemical structure]

[chemical structure]

[chemical structure]

[chemical structure]

[chemical structure]

[chemical structure]

[chemical structure]

[chemical structure]

[chemical structure]

[chemical structure]

[chemical structure]

[chemical structure]

[chemical structure]

[chemical structure]

[chemical structure]

[chemical structure]

[chemical structure]

[chemical structure]

[chemical structure]

[chemical structure]

[chemical structure]

[chemical structure]

[chemical structure]

[chemical structure]

[chemical structure]

[chemical structure]

[chemical structure]

[chemical structure]

[chemical structure]

[chemical structure]

[chemical structure]

[chemical structure]

[chemical structure]

[chemical structure]

[chemical structure]

[chemical structure]

[chemical structure]

[chemical structure]

[chemical structure]

[chemical structure]

[chemical structure]

[chemical structure]

[chemical structure]

[chemical structure]

[chemical structure]

[chemical structure]

[chemical structure]

[chemical structure]

[chemical structure]

[chemical structure]

[chemical structure]

[chemical structure]

[chemical structure]

[chemical structure]

[chemical structure]

[chemical structure]

[chemical structure]

[chemical structure]

[chemical structure]

[chemical structure]

[chemical structure]

[chemical structure]

[chemical structure]

[chemical structure]

[chemical structure]

[chemical structure]

[chemical structure]

[chemical structure]

[chemical structure]

[chemical structure]

[chemical structure]

[chemical structure]

[chemical structure]

[chemical structure]

[chemical structure]

[chemical structure]

[chemical structure]

[chemical structure]

[chemical structure]

[chemical structure]

[chemical structure]

[chemical structure]

[chemical structure]

[chemical structure]

[chemical structure]

[chemical structure]

[chemical structure]

[chemical structure]

[chemical structure]

[chemical structure]

[chemical structure]

[chemical structure]

[chemical structure]

[chemical structure]

[chemical structure]

[chemical structure]

[chemical structure]

[chemical structure]

[chemical structure]

[chemical structure]

[chemical structure]

[chemical structure]

[chemical structure]

[chemical structure]

[chemical structure]

[chemical structure]

[chemical structure]

[chemical structure]

[chemical structure]

[chemical structure]

[chemical structure]

[chemical structure]

[chemical structure]

[chemical structure]

[chemical structure]

[chemical structure]

[chemical structure]

[chemical structure]

[chemical structure]

[chemical structure]

[chemical structure]

[chemical structure]

[chemical structure]

[chemical structure]

[chemical structure]

[chemical structure]

[chemical structure]

[chemical structure]

[chemical structure]

[chemical structure]

[chemical structure]

[chemical structure]

[chemical structure]

[chemical structure]

[chemical structure]

[chemical structure]

[chemical structure]

[chemical structure]

[chemical structure]

[chemical structure]

[chemical structure]

[chemical structure]

[chemical structure]

[chemical structure]

[chemical structure]

[chemical structure]

[chemical structure]

[chemical structure]

[chemical structure]

[chemical structure]

[chemical structure]

[chemical structure]

[chemical structure]

[chemical structure]

[chemical structure]

[chemical structure]

[chemical structure]

[chemical structure]

[chemical structure]

[chemical structure]

[chemical structure]

[chemical structure]

[chemical structure]

[chemical structure]

[chemical structure]

[chemical structure]

[chemical structure]

[chemical structure]

[chemical structure]

[chemical structure]

[chemical structure]

[chemical structure]

[chemical structure]

[chemical structure]

[chemical structure]

[chemical structure]

[chemical structure]

[chemical structure]

[chemical structure]

[chemical structure]

[chemical structure]

[chemical structure]

[chemical structure]

[chemical structure]

[chemical structure]

[chemical structure]

[chemical structure]

[chemical structure]

[chemical structure]

[chemical structure]

[chemical structure]

[chemical structure]

[chemical structure]

[chemical structure]

[chemical structure]

[chemical structure]

[chemical structure]

[chemical structure]

[chemical structure]

[chemical structure]

[chemical structure]

[chemical structure]

[chemical structure]

[chemical structure]

[chemical structure]

[chemical structure]

[chemical structure]

[chemical structure]

[chemical structure]

[chemical structure]

[chemical structure]

[chemical structure]

[chemical structure]

[chemical structure]

[chemical structure]

[chemical structure]

[chemical structure]

[chemical structure]

[chemical structure]

[chemical structure]

[chemical structure]

[chemical structure]

[chemical structure]

[chemical structure]

[chemical structure]

[chemical structure]

[chemical structure]

[chemical structure]

[chemical structure]

[chemical structure]

[chemical structure]

[chemical structure]

[chemical structure]

[chemical structure]

[chemical structure]

[chemical structure]

[chemical structure]

[chemical structure]

[chemical structure]

[chemical structure]

[chemical structure]

[chemical structure]

[chemical structure]

[chemical structure]

[chemical structure]

[chemical structure]

[chemical structure]

[chemical structure]

[chemical structure]

[chemical structure]

[chemical structure]

[chemical structure]

[chemical structure]

[chemical structure]

[chemical structure]

[chemical structure]

[chemical structure]

[chemical structure]

[chemical structure]

[chemical structure]

[chemical structure]

[chemical structure]

[chemical structure]

[chemical structure]

[chemical structure]

[chemical structure]

[chemical structure]

[chemical structure]

[chemical structure]

[chemical structure]

[chemical structure]

[chemical structure]

[chemical structure]

[chemical structure]

[chemical structure]

[chemical structure]

[chemical structure]

[0968] In some embodiments, the transfer vehicle comprises Lipid A, Lipid B, Lipid C, and/or Lipid D. In some embodiments, inclusion of Lipid A, Lipid B, Lipid C, and/or Lipid D improves encapsulation and/or endosomal escape. In some embodiments, Lipid A, Lipid B, Lipid C, and/or Lipid D are described in international patent application PCT/US2017/028981.

[0969] In some embodiments, an ionizable lipid is Lipid A, which is (9Z,12Z)-3-((4,4-bis(octyloxy)butanoyl)oxy)-2-((((3-(diethylamino)propoxy)carbonyl)oxy)methyl)propyl octadeca9,12-dienoate, also called 3-((4,44bis(octyloxy)butanoyl)oxy)-2-((((3-(diethylamino)propoxy)carbonyl)oxy)methyl)propyl (9Z,12Z)-octadeca-9,12-dienoate. Lipid A can be depicted as:

[chemical structure]

[0970] Lipid A may be synthesized according to WO2015/095340 (e.g., pp. 84-86), incorporated by reference in its entirety.

[0971] In some embodiments, an ionizable lipid is Lipid B, which is ((5-((dimethylamino)methyl)-1,3-phenylene)b is (oxy))bis(octane-8,1-diyl)b is (decanoate). Lipid B can be depicted as:

[chemical structure]

[0972] Lipid B may be synthesized according to WO2014/136086 (e.g., pp. 107-09), incorporated by reference in its entirety.

[0973] In some embodiments, an ionizable lipid is Lipid C, which is 2-((4-(((3-(dimethylamino)propoxy)carbonyl)oxy)hexadecanoyl)oxy)propane-1,3-diyl(9Z,9′Z,12Z,12′Z)-bis(octadeca-9,12-dienoate). Lipid C can be depicted as:

[chemical structure]

[0974] In some embodiments, an ionizable lipid is Lipid D, which is 3-(((3-(dimethylamino)propoxy)carbonyl)oxy)-13-(octanoyloxy)tridecyl 3-octylundecanoate. Lipid D can be depicted as:

[chemical structure]

[0975] Lipid C and Lipid D may be synthesized according to WO2015/095340, incorporated by reference in its entirety.

[0976] In some embodiments, an ionizable lipid is described in US patent publication number 20190321489. In some embodiments, an ionizable lipid is described in international patent publication WO 2010/053572, incorporated herein by reference. In some embodiments, an ionizable lipid is C12-200, described at paragraph [00225] of WO 2010/053572.

[0977] Several ionizable lipids have been described in the literature, many of which are commercially available. In certain embodiments, such ionizable lipids are included in the transfer vehicles described herein. In some embodiments, the ionizable lipid N-[1-(2,3-dioleyloxy)propyl]-N,N,N-trimethylammonium chloride or “DOTMA” is used. (Felgner et al. Proc. Nat'l Acad. Sci. 84, 7413 (1987); U.S. Pat. No. 4,897,355). DOTMA can be formulated alone or can be combined with a neutral lipid, dioleoylphosphatidylethanolamine or “DOPE” or other cationic or non-cationic lipids into a lipid nanoparticle. Other suitable cationic lipids include, for example, ionizable cationic lipids as described in U.S. provisional patent application 61/617,468, filed Mar. 29, 2012 (incorporated herein by reference), such as, e.g., (15Z,18Z)—N,N-dimethyl-6-(9Z,12Z)-octadeca-9,12-dien-1-yl)tetracosa-15,18-dien-1-amine (HGT5000), (15Z,18Z)—N,N-dimethyl-6-((9Z,12Z)-octadeca-9,12-dien-1-yl)tetracosa-4,15,18-trien-1-amine (HGT5001), and (15Z,18Z)—N,N-dimethyl-6-((9Z,12Z)-octadeca-9,12-dien-1-yl)tetracosa-5,15,18-trien-1-amine (HGT5002), C₁₂₋₂₀₀ (described in WO 2010/053572), 2-(2,2-di((9Z,12Z)-octadeca-9,12-dien-1-yl)-1,3-dioxolan-4-yl)-N,N-dimethylethanamine (DLinKC2-DMA)) (See, WO 2010/042877; Semple et al., Nature Biotech. 28:172-176 (2010)), 2-(2,2-di((9Z,2Z)-octadeca-9,12-dien-1-yl)-1,3-dioxolan-4-yl)-N,N-dimethylethanamine (DLin-KC2-DMA), (3S,10R,13R,17R)-10,13-dimethyl-17-((R)-6-methylheptan-2-yl)-2, 3, 4, 7, 8, 9, 10, 11, 12, 13, 14, 15, 16, 17-tetradecahydro-1H-cyclopenta[a]phenanthren-3-yl 3-(1H-imidazol-4-yl)propanoate (ICE), (15Z,18Z)—N,N-dimethyl-6-(9Z,12Z)-octadeca-9,12-dien-1-yl)tetracosa-15,18-dien-1-amine (HGT5000), (15Z,18Z)—N,N-dimethyl-6-((9Z,12Z)-octadeca-9,12-dien-1-yl)tetr acosa-4,15,18-trien-1-amine (HGT5001), (15Z,18 Z)—N,N-dimethyl-6-((9Z,12Z)-octadeca-9,12-dien-1-yl)tetracosa-5,15,18-trien-1-amine (HGT5002), 5-carboxyspermylglycine-dioctadecylamide (DOGS), 2,3-dioleyloxy-N-[2(spermine-carboxamido)ethyl]-N,N-dimethyl-1-propanaminium (DOSPA) (Behr et al. Proc. Nat.'l Acad. Sci. 86, 6982 (1989); U.S. Pat. Nos. 5,171,678; 5,334,761), 1,2-Dioleoyl-3-Dimethylammonium-Propane (DODAP), 1,2-Dioleoyl-3-Trimethylammonium-Propane or (DOTAP). Contemplated ionizable lipids also include 1,2-distcaryloxy-N,N-dimethyl-3-aminopropane (DSDMA), 1,2-dioleyloxy-N,N-dimethyl-3-aminopropane (DODMA), 1,2-dilinoleyloxy-N,N-dimethyl-3-aminopropane (DLinDMA), 1,2-dilinolenyloxy-N,N-dimethyl-3-aminopropane (DLenDMA), N-dioleyl-N,N-dimethylammonium chloride (DODAC), N,N-distearyl-N,N-dimethylammonium bromide (DDAB), N-(1,2-dimyristyloxyprop-3-yl)-N,N-dimethyl-N-hydroxyethyl ammonium bromide (DMRIE), 3-dimethylamino-2-(cholest-5-en-3-beta-oxybutan-4-oxy)-1-(cis,cis-9,12-octadecadienoxy)propane (CLinDMA), 2-[5′-(cholest-5-en-3-beta-oxy)-3′-oxapentoxy)-3-dimethyl-1-(cis,cis-9′,1-2′-octadecadienoxy)propane (CpLinDMA), N,N-dimethyl-3,4-dioleyloxybenzylamine (DMOBA), 1,2-N,N′-dioleylcarbamyl-3-dimethylaminopropane (DOcarbDAP), 2,3-Dilinoleoyloxy-N,N-dimethylpropylamine (DLinDAP), 1,2-N,N′-Dilinoleylcarbamyl-3-dimethylamninopropane (DLincarbDAP), 1,2-Dilinoleoylcarbamyl-3-dimethylaminopropane (DLinCDAP), 2,2-dilinoleyl-4-dimethylaminomethy1-[1,3]-dioxolane (DLin-K-DMA), 2,2-dilinoleyl-4-dimethylaminoethyl-[1,3]-dioxolane (DLin-K-XTC2-DMA) or GL67, or mixtures thereof. (Heyes, J., et al., J Controlled Release 107: 276-287 (2005); Morrissey, D V., et al., Nat. Biotechnol. 23(8): 1003-1007 (2005); PCT Publication WO2005/121348A1). The use of cholesterol-based ionizable lipids to formulate the transfer vehicles (e.g., lipid nanoparticles) is also contemplated by the present invention. Such cholesterol-based ionizable lipids can be used, either alone or in combination with other lipids. Suitable cholesterol-based ionizable lipids include, for example, DC-Cholesterol (N,N-dimethyl-N-ethylcarboxamidocholesterol), and 1,4-bis(3-N-oleylamino-propyl)piperazine (Gao, et al., Biochem. Biophys. Res. Comm. 179, 280 (1991); Wolf et al. BioTechniques 23, 139 (1997); U.S. Pat. No. 5,744,335).

[0978] Also contemplated are cationic lipids such as dialkylamino-based, imidazole-based, and guanidinium-based lipids. For example, also contemplated is the use of the ionizable lipid (3S,10R,13R,17R)-10,13-dimethyl-17-((R)-6-methylheptan-2-yl)-2, 3, 4, 7, 8, 9, 10, 11, 12, 13, 14, 15, 16, 17-tetradecahydro-1H-cyclopenta[a]phenanthren-3-yl 3-(1H-imidazol-4-yl)propanoate (ICE), as disclosed in International Application No. PCT/US2010/058457, incorporated herein by reference.

[0979] Also contemplated are ionizable lipids such as the dialkylamino-based, imidazole-based, and guanidinium-based lipids. For example, certain embodiments are directed to a composition comprising one or more imidazole-based ionizable lipids, for example, the imidazole cholesterol ester or “ICE” lipid, (3S,10R, 13R, 17R)-10, 13-dimethyl-17-((R)-6-methylheptan-2-yl)-2, 3, 4, 7, 8, 9, 10, 11, 12, 13, 14, 15, 16, 17-tetradecahydro-1H-cyclopenta[a]phenanthren-3-yl 3-(1H-imidazol-4-yl)propanoate, as represented by structure (XIII) below. In an embodiment, a transfer vehicle for delivery of circRNA may comprise one or more imidazole-based ionizable lipids, for example, the imidazole cholesterol ester or “ICE” lipid (3S,10R, 13R, 17R)-10, 13-dimethyl-17-((R)-6-methylheptan-2-yl)-2, 3, 4, 7, 9, 10, 11, 12, 13, 14, 15, 16, 17-tetradecahydro-1H-cyclopenta[a]phenanthren-3-yl 3-(1H-imidazol-4-yl)propanoate, as represented by structure (XIII).

[chemical structure]

[0980] Without wishing to be bound by a particular theory, it is believed that the fusogenicity of the imidazole-based cationic lipid ICE is related to the endosomal disruption which is facilitated by the imidazole group, which has a lower pKa relative to traditional ionizable lipids. The endosomal disruption in turn promotes osmotic swelling and the disruption of the liposomal membrane, followed by the transfection or intracellular release of the nucleic acid(s) contents loaded therein into the target cell.

[0981] The imidazole-based ionizable lipids are also characterized by their reduced toxicity relative to other ionizable lipids.

[0982] In some embodiments, an ionizable lipid is described by US patent publication number 20190314284. In certain embodiments, the an ionizable lipid is described by structure 3, 4, 5, 6, 7, 8, 9, or 10 (e.g., HGT4001, HGT4002, HGT4003, HGT4004 and/or HGT4005). In certain embodiments, the one or more cleavable functional groups (e.g., a disulfide) allow, for example, a hydrophilic functional head-group to dissociate from a lipophilic functional tail-group of the compound (e.g., upon exposure to oxidative, reducing or acidic conditions), thereby facilitating a phase transition in the lipid bilayer of the one or more target cells. For example, when a transfer vehicle (e.g., a lipid nanoparticle) comprises one or more of the lipids of structures 3-10, the phase transition in the lipid bilayer of the one or more target cells facilitates the delivery of the circRNA into the one or more target cells.

[0983] In certain embodiments, the ionizable lipid is described by structure (XIV),

[chemical structure]

wherein:

[0984] R₁ is selected from the group consisting of imidazole, guanidinium, amino, imine, enamine, an optionally-substituted alkyl amino (e.g., an alkyl amino such as dimethylamino) and pyridyl;

[0985] R₂ is selected from the group consisting of structure XV and structure XVI;

[chemical structure]

[0986] wherein R₃ and R₄ are each independently selected from the group consisting of an optionally substituted, variably saturated or unsaturated C6-C₂₀ alkyl and an optionally substituted, variably saturated or unsaturated C₆-C₂₀ acyl; and wherein n is zero or any positive integer (e.g., one, two, three, four, five, six, seven, eight, nine, ten, eleven, twelve, thirteen, fourteen, fifteen, sixteen, seventeen, eighteen, nineteen, twenty or more). In certain embodiments, R₃ and R₄ are each an optionally substituted, polyunsaturated C18 alkyl, while in other embodiments R₃ and R₄ are each an unsubstituted, polyunsaturated C18 alkyl. In certain embodiments, one or more of R₃ and R₄ are (9Z,12Z)-octadeca-9,12-dien.

[0987] Also disclosed herein are pharmaceutical compositions that comprise the compound of structure XIV, wherein R₁ is selected from the group consisting of imidazole, guanidinium, amino, imine, enamine, an optionally-substituted alkyl amino (e.g., an alkyl amino such as dimethylamino) and pyridyl; wherein R₂ is structure XV; and wherein n is zero or any positive integer. Further disclosed herein are pharmaceutical compositions comprising the compound of structure XIV, wherein R₁ is selected from the group consisting of imidazole, guanidinium, amino, imine, enamine, an optionally-substituted alkyl amino (e.g., an alkyl amino such as dimethylamino) and pyridyl; wherein R₂ is structure XVI; wherein R₃ and R₄ are each independently selected from the group consisting of an optionally substituted, variably saturated or unsaturated C6-C20 alkyl and an optionally substituted, variably saturated or unsaturated C6-C20 acyl; and wherein n is zero or any positive integer. In certain embodiments. R₃ and R4 are each an optionally substituted, polyunsaturated C18 alkyl, while in other embodiments R₃ and R4 are each an unsubstituted, polyunsaturated C18 alkyl (e.g., octadeca-9,12-dien).

[0988] In certain embodiments, the R₁ group or head-group is a polar or hydrophilic group (e.g., one or more of the imidazole, guanidinium and amino groups) and is bound to the R₂ lipid group by way of the disulfide (S—S) cleavable linker group, for example as depicted in structure XIV. Other contemplated cleavable linker groups may include compositions that comprise one or more disulfide (S—S) linker group bound (e.g., covalently bound) to, for example an alkyl group (e.g., C₁ to C10 alkyl). In certain embodiments, the R₁ group is covalently bound to the cleavable linker group by way of a C₁-C₂₀ alkyl group (e.g., where n is one to twenty), or alternatively may be directly bound to the cleavable linker group (e.g., where n is zero). In certain embodiments, the disulfide linker group is cleavable in vitro and/or in vivo (e.g., enzymatically cleavable or cleavable upon exposure to acidic or reducing conditions).

[0989] In certain embodiments, the inventions relate to the compound 5-(((10,13-dimethyl-17-(6-methylheptan-2-yl)-2,3,4,7,8,9,10,11,12,13,14,15,16,17-tetradecahydro-1H-cyclopenta[a]phenanthren-3-yl)disulfanyl)methyl)-1H-imidazole, having structure XVII (referred to herein as “HGT4001”).

[chemical structure]

[0990] In certain embodiments, the inventions relate to the compound 1-(2-(((3S,10R, 13R)-10, 13-dimethyl-17-((R)-6-methylheptan-2-yl)-2,3,4,7,8,9,10,11,12,13,14,15,16,17-tetradecahydro-1H-cyclopenta[a]phenanthren-3-yl)disulfanyl)ethyl)guanidine, having structure XVIII (referred to herein as “HGT4002”).

[chemical structure]

[0991] In certain embodiments, the inventions relate to the compound 2-((2,3-Bis((9Z,12Z)-octadeca-9,12-dien-1-yloxy)propyl)disulfanyl)-N,N-dimethylethanamine, having structure XIX (referred to herein as “HGT4003”).

[chemical structure]

[0992] In other embodiments, the inventions relate to the compound 5-(((2,3-bis((9Z,12Z)-octadeca-9,12-dien-1-yloxy)propyl)disulfanyl)methyl)-1H-imidazole having the structure of structure XX (referred to herein as “HGT4004”).

[chemical structure]

[0993] In still other embodiments, the inventions relate to the compound 1-(((2,3-bis((9Z,12Z)-octadeca-9,12-dien-1-yloxy)propyl)disulfanyl)methyl)guanidine having structure XXI (referred to herein as “HGT4005”).

[chemical structure]

[0994] In certain embodiments, the compounds described as structures 3-10 are ionizable lipids.

[0995] The compounds, and in particular the imidazole-based compounds described as structures 3-8 (e.g., HGT4001 and HGT4004), are characterized by their reduced toxicity, in particular relative to traditional ionizable lipids. In some embodiments, the transfer vehicles described herein comprise one or more imidazole-based ionizable lipid compounds such that the relative concentration of other more toxic ionizable lipids in such pharmaceutical or liposomal composition may be reduced or otherwise eliminated.

[0996] The ionizable lipids include those disclosed in international patent application PCT/US2019/025246, and US patent publications 2017/0190661 and 2017/0114010, incorporated herein by reference in their entirety. The ionizable lipids may include a lipid selected from the following tables 12, 13, 14, or 15.

TABLE 12

| | |
|---|---|
| [chemical structure] | ATX-001 |
| [chemical structure] | ATX-002 |
| [chemical structure] | ATX-003 |
| [chemical structure] | ATX-004 |
| [chemical structure] | ATX-005 |
| [chemical structure] | ATX-006 |
| [chemical structure] | ATX-007 |
| [chemical structure] | ATX-008 |
| [chemical structure] | ATX-009 |
| [chemical structure] | ATX-010 |
| [chemical structure] | ATX-011 |
| [chemical structure] | ATX-012 |
| [chemical structure] | ATX-013 |
| [chemical structure] | ATX-014 |
| [chemical structure] | ATX-015 |
| [chemical structure] | ATX-016 |
| [chemical structure] | ATX-017 |
| [chemical structure] | ATX-018 |
| [chemical structure] | ATX-019 |
| [chemical structure] | ATX-020 |
| [chemical structure] | ATX-021 |
| [chemical structure] | ATX-022 |
| [chemical structure] | ATX-023 |
| [chemical structure] | ATX-024 |
| [chemical structure] | ATX-025 |
| [chemical structure] | ATX-026 |
| [chemical structure] | ATX-027 |
| [chemical structure] | ATX-028 |
| [chemical structure] | ATX-029 |
| [chemical structure] | ATX-030 |
| [chemical structure] | ATX-031 |
| [chemical structure] | ATX-032 |

TABLE 13

| | |
|---|---|
| [chemical structure] | ATX-B-1 |
| [chemical structure] | ATX-B-2 |
| [chemical structure] | ATX-B-3 |
| [chemical structure] | ATX-B-4 |
| [chemical structure] | ATX-B-5 |
| [chemical structure] | ATX-B-6 |
| [chemical structure] | ATX-B-7 |
| [chemical structure] | ATX-B-8 |
| [chemical structure] | ATX-B-9 |
| [chemical structure] | ATX-B-10 |
| [chemical structure] | ATX-B-11 |
| [chemical structure] | ATX-B-12 |

| Compound | ATX-# |
|---|---|
| [chemical structure] | 0063 |
| [chemical structure] | 0130 |
| [chemical structure] | 0131 |
| [chemical structure] | 0044 |
| [chemical structure] | 0111 |
| [chemical structure] | 0132 |
| [chemical structure] | 0134 |
| [chemical structure] | 0133 |
| [chemical structure] | 0064 |
| [chemical structure] | 0061 |
| [chemical structure] | 0100 |
| [chemical structure] | 0117 |
| [chemical structure] | 0114 |
| [chemical structure] | 0115 |
| [chemical structure] | 0101 |
| [chemical structure] | 0106 |
| [chemical structure] | 0116 |
| [chemical structure] | 0043 |
| [chemical structure] | 0086 |
| [chemical structure] | 0058 |
| [chemical structure] | 0081 |
| [chemical structure] | 0123 |
| [chemical structure] | 0122 |
| [chemical structure] | 0057 |
| [chemical structure] | 0088 |
| [chemical structure] | 0087 |
| [chemical structure] | 0124 |
| [chemical structure] | 0128 |
| [chemical structure] | 0127 |
| [chemical structure] | 0126 |
| [chemical structure] | 0129 |
| [chemical structure] | 0082 |
| [chemical structure] | 0085 |
| [chemical structure] | 0083 |
| [chemical structure] | 0121 |
| [chemical structure] | 0091 |
| [chemical structure] | 0102 |
| [chemical structure] | 0098 |
| [chemical structure] | 0092 |
| [chemical structure] | 0084 |
| [chemical structure] | 0095 |
| [chemical structure] | 0125 |
| [chemical structure] | 0094 |
| [chemical structure] | 0109 |
| [chemical structure] | 0110 |
| [chemical structure] | 0118 |
| [chemical structure] | 0108 |
| [chemical structure] | 0107 |
| [chemical structure] | 0093 |
| [chemical structure] | 0097 |
| [chemical structure] | 0096 |

TABLE 15

| | |
|---|---|
| [chemical structure] | 11 |
| [chemical structure] | 13 |
| [chemical structure] | 14 |
| [chemical structure] | 15 |
| [chemical structure] | 16 |
| [chemical structure] | 17 |
| [chemical structure] | 18 |
| [chemical structure] | 19 |
| [chemical structure] | 20 |

[0997] In some embodiments, an ionizable lipid is as described in international patent application PCT/US2019/015913. In some embodiments, an ionizable lipid is chosen from the following:

[chemical structure]

[chemical structure]

[chemical structure]

[chemical structure]

[chemical structure]

[chemical structure]

[chemical structure]

[chemical structure]

[chemical structure]

[chemical structure]

[chemical structure]

[chemical structure]

[chemical structure]

[chemical structure]

[chemical structure]

[chemical structure]

[chemical structure]

[chemical structure]

[chemical structure]

[chemical structure]

[chemical structure]

[chemical structure]

[chemical structure]

[chemical structure]

[chemical structure]

[chemical structure]

[chemical structure]

[chemical structure]

[chemical structure]

[chemical structure]

[chemical structure]

[chemical structure]

[chemical structure]

[chemical structure]

[chemical structure]

[chemical structure]

[chemical structure]

[chemical structure]

[chemical structure]

[chemical structure]

[chemical structure]

[chemical structure]

[chemical structure]

[chemical structure]

[chemical structure]

[chemical structure]

[chemical structure]

[chemical structure]

[chemical structure]

[chemical structure]

[chemical structure]

[chemical structure]

[chemical structure]

[chemical structure]

[chemical structure]

[chemical structure]

[chemical structure]

[chemical structure]

[chemical structure]

[chemical structure]

[chemical structure]

[chemical structure]

[chemical structure]

[chemical structure]

[chemical structure]

[chemical structure]

[chemical structure]

[chemical structure]

[chemical structure]

### 5.1 Amine Lipids

[0998] In certain embodiments, transfer vehicle compositions for the delivery of circular RNA comprise an amine lipid. In certain embodiments, an ionizable lipid is an amine lipid. In some embodiments, an amine lipid is described in international patent application PCT/US2018/053569.

[0999] In some embodiments, the amine lipid is Lipid E, which is (9Z,12Z)-3-((4,4-bis(octyloxy)butanoyl)oxy)-2-((((3-(diethylamino)propoxy)carbonyl)oxy)methyl)propyl octadeca-9,12-dienoate.

[1000] Lipid E can be depicted as:

[chemical structure]

[1001] Lipid E may be synthesized according to WO2015/095340 (e.g., pp. 84-86). In certain embodiments, the amine lipid is an equivalent to Lipid E.

[1002] In certain embodiments, an amine lipid is an analog of Lipid E. In certain embodiments, a Lipid E analog is an acetal analog of Lipid E. In particular transfer vehicle compositions, the acetal analog is a C4-C12 acetal analog. In some embodiments, the acetal analog is a C5-C12 acetal analog. In additional embodiments, the acetal analog is a C5-C10 acetal analog. In further embodiments, the acetal analog is chosen from a C4, C5, C6, C7, C9, C10, C11 and C12 acetal analog.

[1003] Amine lipids and other biodegradable lipids suitable for use in the transfer vehicles, e.g., lipid nanoparticles, described herein are biodegradable in vivo. The amine lipids described herein have low toxicity (e.g., are tolerated in animal models without adverse effect in amounts of greater than or equal to 10 mg/kg). In certain embodiments, transfer vehicles composing an amine lipid include those where at least 75% of the amine lipid is cleared from the plasma within 8, 10, 12, 24, or 48 hours, or 3, 4, 5, 6, 7, or 10 days.

[1004] Biodegradable lipids include, for example, the biodegradable lipids of WO2017/173054, WO2015/095340, and WO2014/136086.

[1005] Lipid clearance may be measured by methods known by persons of skill in the art. See, for example, Maier, M. A., et al. Biodegradable Lipids Enabling Rapidly Eliminated Lipid Nanoparticles for Systemic Delivery of RNAi Therapeutics. Mol. Ther. 2013, 21(8), 1570-78.

[1006] Transfer vehicle compositions comprising an amine lipid can lead to an increased clearance rate. In some embodiments, the clearance rate is a lipid clearance rate, for example the rate at which a lipid is cleared from the blood, serum, or plasma. In some embodiments, the clearance rate is an RNA clearance rate, for example the rate at which an circRNA is cleared from the blood, serum, or plasma. In some embodiments, the clearance rate is the rate at which transfer vehicles are cleared from the blood, serum, or plasma. In some embodiments, the clearance rate is the rate at which transfer vehicles are cleared from a tissue, such as liver tissue or spleen tissue. In certain embodiments, a high rate of clearance leads to a safety profile with no substantial adverse effects. The amine lipids and biodegradable lipids may reduce transfer vehicle accumulation in circulation and in tissues. In some embodiments, a reduction in transfer vehicle accumulation in circulation and in tissues leads to a safety profile with no substantial adverse effects.

[1007] Lipids may be ionizable depending upon the pH of the medium they are in. For example, in a slightly acidic medium, the lipid, such as an amine lipid, may be protonated and thus bear a positive charge. Conversely, in a slightly basic medium, such as, for example, blood, where pH is approximately 7.35, the lipid, such as an amine lipid, may not be protonated and thus bear no charge.

[1008] The ability of a lipid to bear a charge is related to its intrinsic pKa. In some embodiments, the amine lipids of the present disclosure may each, independently, have a pKa in the range of from about 5.1 to about 7.4. In some embodiments, the bioavailable lipids of the present disclosure may each, independently, have a pKa in the range of from about 5.1 to about 7.4. For example, the amine lipids of the present disclosure may each, independently, have a pKa in the range of from about 5.8 to about 6.5. Lipids with a pKa ranging from about 5.1 to about 7.4 are effective for delivery of cargo in vivo, e.g., to the liver. Further, it has been found that lipids with a pKa ranging from about 5.3 to about 6.4 are effective for delivery in vivo, e.g., into tumors. See, e.g., WO2014/136086.

### 5.2 Lipids Containing a Disulfide Bond

[1009] In some embodiments, the ionizable lipid is described in U.S. Pat. No. 9,708,628.

[1010] The present invention provides a lipid represented by structure (XXII):

[chemical structure]

[1011] In structure (XXII), X^{a} and X^{b} are each independently X¹ or X² shown below.

[chemical structure]

[1012] R⁴ in X¹ is an alkyl group having 1-6 carbon atoms, which may be linear, branched or cyclic. The alkyl group preferably has a carbon number of 1-3. Specific examples of the alkyl group having 1-6 carbon atoms include methyl group, ethyl group, propyl group, isopropyl group, n-butyl group, sec-butyl group, isobutyl group, tert-butyl group, pentyl group, isopentyl group, neopentyl group, t-pentyl group, 1,2-dimethylpropyl group, 2-methylbutyl group, 2-methylpentyl group, 3-methylpentyl group, 2,2-dimethylbutyl group, 2,3-dimethylbutyl group, cyclohexyl group and the like. R⁴ is preferably a methyl group, an ethyl group, a propyl group or an isopropyl group, most preferably a methyl group.

[1013] The sin X² is 1 or 2. When s is 1, X² is a pyrrolidinium group, and when s is 2, X² is a piperidinium group. s is preferably 2. While the binding direction of X² is not limited, a nitrogen atom in X² preferably binds to R^{1a} and R^{1b}.

[1014] X^{a} may be the same as or different from X^{b}, and X^{a} is preferably the same group as X^{b}.

[1015] n^{a} and n^{b} are each independently 0 or 1, preferably 1. When n^{a} is 1, R^{3a} binds to X^{a} via Y^{a} and R^{2a}, and when n^{a} is 0, a structure of R^{3a}—X^{a}—R^{1a}—S— is taken. Similarly, when n^{b} is 1, R^{3b} binds to X^{b} via Y^{b} and R^{2b}, and when n^{b} is 0, a structure of R^{3b}—X^{b}—R^{1b}—S— is taken.

[1016] n^{a} may be the same as or different from n^{b}, and n^{a} is preferably the same as n^{b}.

[1017] R^{1a} and R^{1b} are each independently an alkylene group having 1-6 carbon atoms, which may be linear or branched, preferably linear. Specific examples of the alkylene group having 1-6 carbon atoms include methylene group, ethylene group, trimethylene group, isopropylene group, tetramethylene group, isobutylene group, pentamethylene group, neopentylene group and the like. R^{1a} and R^{1b} are each preferably a methylene group, an ethylene group, a trimethylene group, an isopropylene group or a tetramethylene group, most preferably an ethylene group.

[1018] R^{1a} may be the same as or different from R^{1b}, and R^{1a} is preferably the same group as R^{1b}.

[1019] R^{2a} and R^{2b} are each independently an alkylene group having 1-6 carbon atoms, which may be linear or branched, preferably linear. Examples of the alkylene group having 1-6 carbon atoms include those recited as the examples of the alkylene group having 1-6 carbon atoms for R^{1a} or R^{1b}. R^{2a}, and R^{2b} are each preferably a methylene group, an ethylene group, a trimethylene group, an isopropylene group or a tetramethylene group.

[1020] When X^{a} and X^{b} are each X¹, R^{2a}, and R^{2b} are preferably trimethylene groups. When X^{a} and X^{b} are each X², R^{2a}, and R^{2b} are preferably ethylene groups.

[1021] R^{2a}, may be the same as or different from R^{2b}, and R^{2a}, is preferably the same group as R^{2b}

[1022] Y^{a} and Y^{b} are each independently an ester bond, an amide bond, a carbamate bond, an ether bond or a urea bond, preferably an ester bond, an amide bond or a carbamate bond, most preferably an ester bond. While the binding direction of Y^{a} and Y^{b} is not limited, when Y^{a} is an ester bond, a structure of R^{3a}—CO—O−R^{2a}— is preferable, and when Y^{b} is an ester bond, a structure of R^{3b}—CO—O—R^{2b}— is preferable.

[1023] Y^{a} may be the same as or different from Y^{b}, and Y^{a} is preferably the same group as Y^{b}.

[1024] R^{3a} and R^{3b} are each independently a sterol residue, a liposoluble vitamin residue or an aliphatic hydrocarbon group having 12-22 carbon atoms, preferably a liposoluble vitamin residue or an aliphatic hydrocarbon group having 12-22 carbon atoms, most preferably a liposoluble vitamin residue.

[1025] Examples of the sterol residue include a cholesteryl group (cholesterol residue), a cholestaryl group (cholestanol residue), a stigmasteryl group (stigmasterol residue), a β-sitosteryl group (β-sitosterol residue), a lanosteryl group (lanosterol residue), and an ergosteryl group (ergosterol residue) and the like. The sterol residue is preferably a cholesteryl group or a cholestaryl group.

[1026] As the liposoluble vitamin residue, a residue derived from liposoluble vitamin, as well as a residue derived from a derivative obtained by appropriately converting a hydroxyl group, aldehyde or carboxylic acid, which is a functional group in liposoluble vitamin, to other reactive functional group can be used. As for liposoluble vitamin having a hydroxyl group, for example, the hydroxyl group can be converted to a carboxylic acid by reacting with succinic acid anhydride, glutaric acid anhydride and the like. Examples of the liposoluble vitamin include retinoic acid, retinol, retinal, ergosterol, 7-dehydrocholesterol, calciferol, cholecalciferol, dihydroergocalciferol, dihydrotachysterol, tocopherol, tocotrienol and the like. Preferable examples of the liposoluble vitamin include retinoic acid and tocopherol.

[1027] The aliphatic hydrocarbon group having 12-22 carbon atoms may be linear or branched, preferably linear. The aliphatic hydrocarbon group may be saturated or unsaturated. In the case of an unsaturated aliphatic hydrocarbon group, the aliphatic hydrocarbon group generally contains 1-6, preferably 1-3, more preferably 1-2 unsaturated bonds. While the unsaturated bond includes a carbon-carbon double bond and a carbon-carbon triple bond, it is preferably a carbon-carbon double bond. The aliphatic hydrocarbon group has a carbon number of preferably 12-18, most preferably 13-17. While the aliphatic hydrocarbon group includes an alkyl group, an alkenyl group, an alkynyl group and the like, it is preferably an alkyl group or an alkenyl group. Specific examples of the aliphatic hydrocarbon group having 12-22 carbon atoms include dodecyl group, tridecyl group, tetradecyl group, pentadecyl group, hexadecyl group, heptadecyl group, octadecyl group, nonadecyl group, icosyl group, henicosyl group, docosyl group, dodecenyl group, tridecenyl group, tetradecenyl group, pentadecenyl group, hexadecenyl group, heptadecenyl group, octadecenyl group, nonadecenyl group, icosenyl group, henicosenyl group, docosenyl group, decadienyl group, tridecadienyl group, tetradecadienyl group, pentadecadienyl group, hexadecadienyl group, heptadecadienyl group, octadecadienyl group, nonadecadienyl group, icosadienyl group, henicosadienyl group, docosadienyl group, octadecatrienyl group, icosatrienyl group, icosatetraenyl group, icosapentaenyl group, docosahexaenyl group, isostearyl group and the like. The aliphatic hydrocarbon group having 12-22 carbon atoms is preferably tridecyl group, tetradecyl group, heptadecyl group, octadecyl group, heptadecadienyl group or octadecadienyl group, particularly preferably tridecyl group, heptadecyl group or heptadecadienyl group.

[1028] In one embodiment, an aliphatic hydrocarbon group having 12-22 carbon atoms, which is derived from fatty acid, aliphatic alcohol, or aliphatic amine is used. When R^{3a} (or R^{3b}) is derived from fatty acid, Y^{a} (or Y^{b}) is an ester bond or an amide bond, and fatty acid-derived carbonyl carbon is included in Y^{a} (or Y^{b}). For example, when linoleic acid is used, R^{3a} (or R^{3b}) is a heptadecadienyl group.

[1029] R^{3a} may be the same as or different from R^{3b}, and R^{3a} is preferably the same group as R^{3b}.

[1030] In one embodiment, X^{a} is the same as X^{b}, n^{a} is the same as n^{b}, R^{1a} is the same as R^{1b}, R^{2a}, is the same as R^{2b}, R^{3a} is the same as R^{3b}, and Y^{a} is the same as Y^{b}.

[1031] In one embodiment,

[1032] X^{a} and X^{b} are each independently X1,

[1033] R⁴ is an alkyl group having 1-3 carbon atoms, n^{a} and n^{b} are each 1,

[1034] R^{1a} and R^{1b} are each independently an alkylene group having 1-6 carbon atoms,

[1035] R^{2a}, and R^{2b} are each independently an alkylene group having 1-6 carbon atoms,

[1036] Y^{a} and Y^{b} are each an ester bond or an amide bond, and

[1037] R^{3a} and R^{3b} are each independently an aliphatic hydrocarbon group having 12-22 carbon atoms.

[1038] In one embodiment,

[1039] X^{a} and X^{b} are each X1,

[1040] R⁴ is an alkyl group having 1-3 carbon atoms, n^{a} and n^{b} are each 1,

[1041] R^{1a} and R^{1b} are each an alkylene group having 1-6 carbon atoms,

[1042] R^{2a}, and R^{2b} are each an alkylene group having 1-6 carbon atoms,

[1043] Y^{a} and Y^{b} are each an ester bond or an amide bond,

[1044] R^{3a} and R^{3b} are each an aliphatic hydrocarbon group having 12-22 carbon atoms,

[1045] X^{a} is the same as X^{b},

[1046] R^{1a} is the same as R^{1b},

[1047] R^{2a}, is the same as R^{2b}, and

[1048] R^{3a} is the same as R^{3b}.

[1049] In one embodiment,

[1050] X^{a} and X^{b} are each X¹,

[1051] R⁴ is a methyl group, n^{a} and n^{b} are each 1,

[1052] R^{1a} and R^{1b} are each an ethylene group,

[1053] R^{2a}, and R^{2b} are each a trimethylene group,

[1054] Y^{a} and Y^{b} are each —CO—O—, and

[1055] R^{3a} and R^{3b} are each independently an alkyl group or alkenyl group having 13-17 carbon atoms.

[1056] In one embodiment,

[1057] X^{a} and X^{b} are each X¹,

[1058] R⁴ is a methyl group, n^{a} and n^{b} are each 1,

[1059] R^{1a} and R^{1b} are each an ethylene group,

[1060] R^{2a}, and R^{2b} are each a trimethylene group,

[1061] Y^{a} and Y^{b} are each —CO—O—,

[1062] R^{3a} and R^{3b} are each an alkyl group or alkenyl group having 13-17 carbon atoms, and

[1063] R^{3a} is the same as R^{3b}.

[1064] In one embodiment,

[1065] X^{a} and X^{b} are each independently X¹,

[1066] R⁴ is an alkyl group having 1-3 carbon atoms, n^{a} and n^{b} are each 1,

[1067] R^{1a} and R^{1b} are each independently an alkylene group having 1-6 carbon atoms,

[1068] R^{2a}, and R^{2b} are each independently an alkylene group having 1-6 carbon atoms,

[1069] Y^{a} and Y^{b} are each an ester bond or an amide bond, and

[1070] R^{3a} and R^{3b} are each independently a liposoluble vitamin residue (e.g., retinoic acid residue, tocopherol residue).

[1071] In one embodiment,

[1072] X^{a} and X^{b} are each X¹,

[1073] R⁴ is an alkyl group having 1-3 carbon atoms, n^{a} and n^{b} are each 1,

[1074] R^{1a} and R^{1b} are each an alkylene group having 1-6 carbon atoms,

[1075] R^{2a}, and R^{2b} are each an alkylene group having 1-6 carbon atoms,

[1076] Y^{a} and Y^{b} are each an ester bond or an amide bond,

[1077] R^{3a} and R^{3b} are each a liposoluble vitamin residue (e.g., retinoic acid residue, tocopherol residue),

[1078] X^{a} is the same as X^{b},

[1079] R^{1a} is the same as R¹,

[1080] R^{2a}, is the same as R^{2b}, and

[1081] R^{3a} is the same as R^{3b}.

[1082] In one embodiment,

[1083] X^{a} and X^{b} are each X¹,

[1084] R⁴ is a methyl group, n^{a} and n^{b} are each 1,

[1085] R^{1a} and R^{1b} are each an ethylene group,

[1086] R^{2a}, and R^{2b} are each a trimethylene group,

[1087] Y^{a} and Y^{b} are each —CO—O—, and

[1088] R^{3a} and R^{3b} are each independently a liposoluble vitamin residue (e.g., retinoic acid residue, tocopherol residue).

[1089] In one embodiment,

[1090] X^{a} and X^{b} are each X¹,

[1091] R⁴ is a methyl group, n^{a} and n^{b} are each 1,

[1092] R^{1a} and R^{1b} are each an ethylene group,

[1093] R^{2a}, and R^{2b} are each a trimethylene group,

[1094] Y^{a} and Y^{b} are each —CO—O—,

[1095] R^{3a} and R^{3b} are each a liposoluble vitamin residue (e.g., retinoic acid residue, tocopherol residue), and

[1096] R^{3a} is the same as R^{3b}.

[1097] In one embodiment,

[1098] X^{a} and X^{b} are each independently X²,

[1099] t is 2,

[1100] R^{1a} and R^{1b} are each independently an alkylene group having 1-6 carbon atoms,

[1101] R^{2a}, and R^{2b} are each independently an alkylene group having 1-6 carbon atoms,

[1102] Y^{a} and Y^{b} are each an ester bond, and

[1103] R^{3a} and R^{3b} are each independently a liposoluble vitamin residue (e.g., retinoic acid residue, tocopherol residue) or an aliphatic hydrocarbon group having 12-22 carbon atoms (e.g., alkyl group having 12-22 carbon atoms).

[1104] In one embodiment,

[1105] X^{a} and X^{b} are each independently X²,

[1106] t is 2,

[1107] R^{1a} and R^{1b} are each independently an alkylene group having 1-6 carbon atoms,

[1108] R^{2a}, and R^{2b} are each independently an alkylene group having 1-6 carbon atoms,

[1109] Y^{a} and Y^{b} are each an ester bond,

[1110] R^{3a} and R^{3b} are each independently a liposoluble vitamin residue (e.g., retinoic acid residue, tocopherol residue) or an aliphatic hydrocarbon group having 12-22 carbon atoms (e.g., alkyl group having 12-22 carbon atoms),

[1111] X^{a} is the same as X^{b},

[1112] R^{1a} is the same as R¹,

[1113] R^{2a}, is the same as R^{2b}, and

[1114] R^{3a} is the same as R^{3b}.

[1115] In one embodiment,

[1116] X^{a} and X^{b} are each independently X²,

[1117] t is 2,

[1118] R^{1a} and R^{1b} are each an ethylene group,

[1119] R^{2a}, and R^{2b} are each independently an alkylene group having 1-6 carbon atoms,

[1120] Y^{a} and Y^{b} are each an ester bond,

[1121] R^{3a} and R^{3b} are each independently a liposoluble vitamin residue (e.g., retinoic acid residue, tocopherol residue) or an aliphatic hydrocarbon group having 12-22 carbon atoms (e.g., alkyl group having 12-22 carbon atoms),

[1122] X^{a} is the same as X^{b},

[1123] R^{2a}, is the same as R^{2b}, and

[1124] R^{3a} is the same as R^{3b}.

[1125] In some embodiments, an ionizable lipid has one of the structures set forth in Table 15b below.

TABLE 15b

| Num- | |
|---|---|
| ber | Structure |
| 1 | [chemical structure] |
| 2 | [chemical structure] |
| 3 | [chemical structure] |
| 4 | [chemical structure] |
| 5 | [chemical structure] |
| 6 | [chemical structure] |
| 7 | [chemical structure] |
| 8 | [chemical structure] |
| 9 | [chemical structure] |
| 10 | [chemical structure] |
| 11 | [chemical structure] |
| 12 | [chemical structure] |
| 13 | [chemical structure] |
| 14 | [chemical structure] |
| 15 | [chemical structure] |

[1126] A lipid of the present invention may have an —S—S— (disulfide) bond. The production method for such a compound includes, for example, a method including producing

R^{3a}—(Y^{a}—R^{2a})n^{a}—X^{a}—R^{1a}—SH, and

R^{3b}—(Y^{b}—R^{2b})n^{b}—X^{b}—R^{1b}—SH, and

subjecting them to oxidation (coupling) to give a compound containing —S—S—, a method including sequentially bonding necessary parts to a compound containing an —S—S— bond to finally obtain the compound of the present invention and the like. Preferred is the latter method.

[1127] A specific example of the latter method is shown below, which is not to be construed as limiting.

[1128] Examples of the starting compound include —S—S— bond-containing two terminal carboxylic acid, two terminal carboxylate, two terminal amine, two terminal isocyanate, two terminal alcohol, two terminal alcohol having a leaving group such as MsO (mesylate group) and the like, a two terminal carbonate having a leaving group such as pNP (p-nitrophenylcarbonate group) and the like.

[1129] For example, when a compound containing X¹ or X² for X^{a} and X^{b} is produced, two terminal functional groups of compound (1) containing an —S—S— bond are reacted with an NH group in compound (2) having the —NH— group and one functional group at the terminal, the functional group at the terminal in compound (2) which did not contribute to the reaction is reacted with a functional group in compound (3) containing R³, whereby the compound of the present invention containing an —S—S— bond, R^{1a} and R^{1b}, X^{a} and X^{b}, R^{2a} and R^{2b}, Y^{a} and Y^{b}, and R^{3a} and R^{3b} can be obtained.

[1130] In the reaction of compound (1) and compound (2), an alkali catalyst such as potassium carbonate, sodium carbonate, potassium t-butoxide and the like may be used as a catalyst, or the reaction may be performed without a catalyst. Preferably, potassium carbonate or sodium carbonate is used as a catalyst.

[1131] The amount of catalyst is 0.1-100 molar equivalents, preferably, 0.1-20 molar equivalents, more preferably 0.1-5 molar equivalents, relative to compound (1). The amount of compound (2) to be charged is 1-50 molar equivalents, preferably 1-10 molar equivalents, relative to compound (1).

[1132] The solvent to be used for the reaction of compound (1) and compound (2) is not particularly limited as long as it is a solvent or aqueous solution that does not inhibit the reaction. For example, ethyl acetate, dichloromethane, chloroform, benzene, toluene and the like can be mentioned. Among these, toluene and chloroform are preferable.

[1133] The reaction temperature is −20 to 200° C., preferably 0 to 80° C., more preferably 20 to 50° C., and the reaction time is 1-48 hr, preferably 2-24 hr.

[1134] When the reaction product of compound (1) and compound (2) is reacted with compound (3), an alkali catalyst such as potassium carbonate, sodium carbonate, potassium t-butoxide and the like, or an acid catalyst such as PTS (p-toluenesulfonic acid), MSA (methanesulfonic acid) and the like may be used, like the catalyst used for the reaction of compound (1) and compound (2), or the reaction may be performed without a catalyst.

[1135] In addition, the reaction product of compound (1) and compound (2) may be directly reacted with compound (3) by using a condensing agent such as DCC (dicyclohexylcarbodiimide), DIC (diisopropylcarbodiimide), EDC (1-ethyl-3-(3-dimethylaminopropyl)carbodiimide hydrochloride) and the like. Alternatively, compound (3) may be treated with a condensing agent to be once converted to an anhydride and the like, after which it is reacted with the reaction product of compound (1) and compound (2).

[1136] The amount of compound (3) to be charged is 1-50 molar equivalents, preferably 1-10 molar equivalents, relative to the reaction product of compound (1) and compound (2).

[1137] The catalyst to be used is appropriately selected according to the functional groups to be reacted.

[1138] The amount of catalyst is 0.05-100 molar equivalents, preferably 0.1-20 molar equivalents, more preferably 0.2-5 molar equivalent, relative to compound (1).

[1139] The solvent to be used for the reaction of the reaction product of compound (1) and compound (2) with compound (3) is not particularly limited as long as it is a solvent or aqueous solution that does not inhibit the reaction. For example, ethyl acetate, dichloromethane, chloroform, benzene, toluene and the like can be mentioned. Among these, toluene and chloroform are preferable.

[1140] The reaction temperature is 0 to 200° C., preferably 0 to 120° C. more preferably 20 to 50° C., and the reaction time is 1 hr-48 hr, preferably 2-24 hr.

[1141] The reaction product obtained by the above-mentioned reaction can be appropriately purified by a general purification method, for example, washing with water, silica gel column chromatography, crystallization, recrystallization, liquid-liquid extraction, reprecipitation, ion exchange column chromatography and the like.

### 5.3 Structure XXIII Lipids

[1142] In some embodiments, an ionizable lipid is described in U.S. Pat. No. 9,765,022.

[1143] The present invention provides a compound represented by structure (XXIII):

[chemical structure]

[1144] In structure XXIII, a hydrophilic and optionally positively charged head is

[chemical structure]

in which each of Rₐ, Rₐ′, Rₐ″, and Rₐ″′, independently, is H, a C₁-C₂₀ monovalent aliphatic radical, a C₁-C₂₀ monovalent heteroaliphatic radical, a monovalent aryl radical, or a monovalent heteroaryl radical, and Z is a C₁-C₂₀ bivalent aliphatic radical, a C₁-C₂₀ bivalent heteroaliphatic radical, a bivalent aryl radical, or a bivalent heteroaryl radical; B is a C₁-C₂₄ monovalent aliphatic radical, a C₁-C₂₄ monovalent heteroaliphatic radical, a monovalent aryl radical, a monovalent heteroaryl radical, or

[chemical structure]

each of R₁ and R₄, independently, is a bond, a C₁-C₁₀ bivalent aliphatic radical, a C₁-C₁₀ bivalent heteroaliphatic radical, a bivalent aryl radical, or a bivalent heteroaryl radical; each of R₂ and R₅, independently, is a bond, a C₁-C₂₀ bivalent aliphatic radical, a C₁-C₂₀ bivalent heteroaliphatic radical, a bivalent aryl radical, or a bivalent heteroaryl radical; each of R₃ and R₆, independently, is a C₁-C₂₀ monovalent aliphatic radical, a C₁-C₂₀ monovalent heteroaliphatic radical, a monovalent aryl radical, or a monovalent heteroaryl radical; each of

[chemical structure]

a hydrophobic tail, and

[chemical structure]

also a hydrophobic
tail, has 8 to 24 carbon atoms; and each of X, a linker, and Y, also a linker, independently, is

[chemical structure]

in which each of m, n, p, q, and t, independently, is 1-6; W is O, S, or NR_{c}; each of L₁, L₃, L₅, L₇, and L₉, directly linked to R₁, R₂, R₄, or R₅, independently, is a bond, O, S, or NR_{d}; each of L₂, L₄, L₆, L₈, and L₁₀, independently, is a bond, O, S, or NRₑ; V is OR_{f}, SR_{g}, or NRₕRᵢ; and each of R_{b}, R_{c}, R_{d}, Rₑ, R_{f}, R_{g}, Rₕ, and Rᵢ, independently, is H, OH, C₁₋₁₀ oxyaliphatic radical, C₁-C₁₀ monovalent aliphatic radical, C₁-C₁₀ monovalent heteroaliphatic radical, a monovalent aryl radical, or a monovalent heteroaryl radical.

[1145] A subset of the above-described lipid-like compounds include those in which A is

[chemical structure]

each of R^{a} and Rₐ′, independently, being a C₁-C₁₀ monovalent aliphatic radical, a C₁-C₁₀ monovalent heteroaliphatic radical, a monovalent aryl radical, or a monovalent heteroaryl radical; and Z being a C₁-C₁₀ bivalent aliphatic radical, a C₁-C₁₀ bivalent heteroaliphatic radical, a bivalent aryl radical, or a bivalent heteroaryl radical.

[1146] Some lipid-like compounds of this invention feature each of R₁ and R₄, independently, being C₁-C₆ (e.g., C₁-C₄) bivalent aliphatic radical or a C₁-C₆ (e.g., C₁-C₄) bivalent heteroaliphatic radical, the total carbon number for R₂ and R₃ being 12-20 (e.g., 14-18), the total carbon number of R₅ and R₆ also being 12-20 (e.g., 14-18), and each of X and Y, independently, is

[chemical structure]

[1147] Specific examples of X and Y include

[chemical structure]

m being 2-6.

[1148] Still within the scope of this invention is a pharmaceutical composition containing a nanocomplex that is formed of a protein and a bioreducible compound. In this pharmaceutical composition, the nanocomplex has a particle size of 50 to 500 nm; the bioreducible compound contains a disulfide hydrophobic moiety, a hydrophilic moiety, and a linker joining the disulfide hydrophobic moiety and the hydrophilic moiety; and the protein binds to the bioreducible compound via a non-covalent interaction, a covalent bond, or both.

[1149] In certain embodiments, the disulfide hydrophobic moiety is a heteroaliphatic radical containing one or more —S—S— groups and 8 to 24 carbon atoms; the hydrophilic moiety is an aliphatic or heteroaliphatic radical containing one or more hydrophilic groups and 1-20 carbon atoms, each of the hydrophilic groups being amino, alkylamino, dialkylamino, trialkylamino, tetraalkylammonium, hydroxyamino, hydroxyl, carboxyl, carboxylate, carbamate, carbamide, carbonate, phosphate, phosphite, sulfate, sulfite, or thiosulfate; and the linker is O, S, Si, C₁-C₆ alkylene,

[chemical structure]

in which the variables are defined above.

[1150] Specific examples of X and Y include O, S, Si, C₁-C₆ alkylene,

[chemical structure]

[1151] In some embodiments, a lipid-like compound of this invention, as shown in structure XXIII above, includes (i) a hydrophilic head, A; (ii) a hydrophobic tail, R₂—S—S—R₃; and (iii) a linker, X. Optionally, these compounds contain a second hydrophobic tail, R₅—S—S—R₆ and a second linker, Y.

[1152] The hydrophilic head of structure XXIII contains one or more hydrophilic functional groups, e.g., hydroxyl, carbonyl, carboxyl, amino, sulfhydryl, phosphate, amide, ester, ether, carbamate, carbonate, carbamide, and phosphodiester. These groups can form hydrogen bonds and are optionally positively or negatively charged.

[1153] Examples of the hydrophilic head include:

[chemical structure]

[chemical structure]

[chemical structure]

[chemical structure]

[1154] Other examples include those described in Akinc et al., Nature Biotechnology, 26, 561-69 (2008) and Mahon et al., US Patent Application Publication 2011/0293703.

[1155] The hydrophobic tail of structure XXIII is a saturated or unsaturated, linear or branched, acyclic or cyclic, aromatic or nonaromatic hydrocarbon moiety containing a disulfide bond and 8-24 carbon atoms. One or more of the carbon atoms can be replaced with a heteroatom, such as N, O, P, B, S, Si, Sb, Al, Sn, As, Se, and Ge. The tail is optionally substituted with one or more groups described above. The lipid-like compounds containing this disulfide bond can be bioreducible.

[1156] Examples include:

[chemical structure]

[1157] A linker of structure XXIII links the hydrophilic head and the hydrophobic tail.

[1158] The linker can be any chemical group that is hydrophilic or hydrophobic, polar or non-polar, e.g., O, S, Si, amino, alkylene, ester, amide, carbamate, carbamide, carbonate, phosphate, phosphite, sulfate, sulfite, and thiosulfate. Examples include:

[chemical structure]

[1159] Shown below are exemplary lipid-like compounds of this invention:

[chemical structure]

[chemical structure]

[chemical structure]

[1160] The lipid-like compounds of structure XXIII can be prepared by methods well known the art. See Wang et al., ACS Synthetic Biology, 1, 403-07 (2012); Manoharan, et al., International Patent Application Publication WO 2008/042973; and Zugates et al., U.S. Pat. No. 8,071,082. The route shown below exemplifies synthesis of these lipid-like compounds:

[chemical structure]

[1161] Each of Lₐ, Lₐ′, L, and L′ can be one of L₁-L₁₀; each of Wₐ and W_{b}, independently, is W or V; and Rₐ and R₁-R₆ are defined above, as well as L₁-L₁₀, W, and V.

[1162] In this exemplary synthetic route, an amine compound, i.e., compound D, reacts with bromides E1 and E2 to form compound F, which is then coupled with both G1 and G2 to afford the final product, i.e., compound H. One or both of the double bonds in this compound (shown above) can be reduced to one or two single bonds to obtain different lipid-like compounds of structure XXIII.

[1163] Other lipid-like compounds of this invention can be prepared using other suitable starting materials through the above-described synthetic route and others known in the art. The method set forth above can include an additional step(s) to add or remove suitable protecting groups in order to ultimately allow synthesis of the lipid-like compounds. In addition, various synthetic steps can be performed in an alternate sequence or order to give the desired material. Synthetic chemistry transformations and protecting group methodologies (protection and deprotection) useful in synthesizing applicable lipid-like compounds are known in the art, including, for example, R. Larock, Comprehensive Organic Transformations (2nd Ed., VCH Publishers 1999); P. G. M. Wuts and T. W. Greene, Greene's Protective Groups in Organic Synthesis (4th Ed., John Wiley and Sons 2007); L. Fieser and M. Fieser, Fieser and Fieser's Reagents for Organic Synthesis (John Wiley and Sons 1994); and L. Paquette, ed., Encyclopedia of Reagents for Organic Synthesis (2nd ed., John Wiley and Sons 2009) and subsequent editions thereof. Certain lipid-like compounds may contain a non-aromatic double bond and one or more asymmetric centers. Thus, they can occur as racemates and racemic mixtures, single enantiomers, individual diastereomers, diastereomeric mixtures, and cis- or trans-isomeric forms. All such isomeric forms are contemplated.

[1164] As mentioned above, these lipid-like compounds are useful for delivery of pharmaceutical agents. They can be preliminarily screened for their efficacy in delivering pharmaceutical agents by an in vitro assay and then confirmed by animal experiments and clinic trials. Other methods will also be apparent to those of ordinary skill in the art.

[1165] Not to be bound by any theory, the lipid-like compounds of structure XXIII facilitate delivery of pharmaceutical agents by forming complexes, e.g., nanocomplexes and microparticles. The hydrophilic head of such a lipid-like compound, positively or negatively charged, binds to a moiety of a pharmaceutical agent that is oppositely charged and its hydrophobic moiety binds to a hydrophobic moiety of the pharmaceutical agent. Either binding can be covalent or non-covalent.

[1166] The above described complexes can be prepared using procedures described in publications such as Wang et al., ACS Synthetic Biology, 1, 403-07 (2012). Generally, they are obtained by incubating a lipid-like compound and a pharmaceutical agent in a buffer such as a sodium acetate buffer or a phosphate buffered saline (“PBS”).

### 5.4 Hydrophilic Groups

[1167] In certain embodiments, the selected hydrophilic functional group or moiety may alter or otherwise impart properties to the compound or to the transfer vehicle of which such compound is a component (e.g., by improving the transfection efficiencies of a lipid nanoparticle of which the compound is a component). For example, the incorporation of guanidinium as a hydrophilic head-group in the compounds disclosed herein may promote the fusogenicity of such compounds (or of the transfer vehicle of which such compounds are a component) with the cell membrane of one or more target cells, thereby enhancing, for example, the transfection efficiencies of such compounds. It has been hypothesized that the nitrogen from the hydrophilic guanidinium moiety forms a six-membered ring transition state which grants stability to the interaction and thus allows for cellular uptake of encapsulated materials. (Wender, et al., Adv. Drug Del. Rev. (2008) 60: 452-472.) Similarly, the incorporation of one or more amino groups or moieties into the disclosed compounds (e.g., as a head-group) may further promote disruption of the endosomal/lysosomal membrane of the target cell by exploiting the fusogenicity of such amino groups. This is based not only on the pKa of the amino group of the composition, but also on the ability of the amino group to undergo a hexagonal phase transition and fuse with the target cell surface, i.e. the vesicle membrane. (Koltover, et al. Science (1998) 281: 78-81.) The result is believed to promote the disruption of the vesicle membrane and release of the lipid nanoparticle contents into the target cell.

[1168] Similarly, in certain embodiments the incorporation of, for example, imidazole as a hydrophilic head-group in the compounds disclosed herein may serve to promote endosomal or lysosomal release of, for example, contents that are encapsulated in a transfer vehicle (e.g., lipid nanoparticle) of the invention. Such enhanced release may be achieved by one or both of a proton-sponge mediated disruption mechanism and/or an enhanced fusogenicity mechanism. The proton-sponge mechanism is based on the ability of a compound, and in particular a functional moiety or group of the compound, to buffer the acidification of the endosome. This may be manipulated or otherwise controlled by the pKa of the compound or of one or more of the functional groups comprising such compound (e.g., imidazole). Accordingly, in certain embodiments the fusogenicity of, for example, the imidazole-based compounds disclosed herein (e.g., HGT4001 and HGT4004) are related to the endosomal disruption properties, which are facilitated by such imidazole groups, which have a lower pKa relative to other traditional ionizable lipids. Such endosomal disruption properties in turn promote osmotic swelling and the disruption of the liposomal membrane, followed by the transfection or intracellular release of the polynucleotide materials loaded or encapsulated therein into the target cell. This phenomenon can be applicable to a variety of compounds with desirable pKa profiles in addition to an imidazole moiety. Such embodiments also include multi-nitrogen based functionalities such as polyamines, poly-peptide (histidine), and nitrogen-based dendritic structures.

[1169] Exemplary ionizable and/or cationic lipids are described in International PCT patent publications WO2015/095340, WO2015/199952, WO2018/011633, WO2017/049245, WO2015/061467, WO2012/040184, WO2012/000104, WO2015/074085, WO2016/081029, WO2017/004, 143, WO2017/075531, WO2017/117528, WO2011/022460, WO2013/148541, WO2013/116126, WO2011/153120, WO2012/044638, WO2012/054365, WO2011/090965, WO2013/016058, WO2012/162210, WO2008/042973, WO2010/129709, WO2010/144740, WO20, 12/099755, WO2013/049328, WO2013/086322, WO2013/086373, WO2011/071860, WO2009/132131, WO2010/048536, WO2010/088537, WO2010/054401, WO2010/054406, WO2010/054405, WO2010/054384, WO2012/016184, WO2009/086558, WO2010/042877, WO2011/000106, WO2011/000107, WO2005/120152, WO2011/141705, WO2013/126803, WO2006/007712, WO2011/038160, WO2005/121348, WO2011/066651, WO2009/127060, WO2011/141704, WO2006/069782, WO2012/031043, WO2013/006825, WO2013/033563, WO2013/089151, WO2017/099823, WO2015/095346, and WO2013/086354, and US patent publications US2016/0311759, US2015/0376115, US2016/0151284, US2017/0210697, US2015/0140070, US2013/0178541, US2013/0303587, US2015/0141678, US2015/0239926, US2016/0376224, US2017/0119904, US2012/0149894, US2015/0057373, US2013/0090372, US2013/0274523, US2013/0274504, US2013/0274504, US2009/0023673, US2012/0128760, US2010/0324120, US2014/0200257, US2015/0203446, US2018/0005363, US2014/0308304, US2013/0338210, US2012/0101148, US2012/0027796, US2012/0058144, US2013/0323269, US2011/0117125, US2011/0256175, US2012/0202871, US2011/0076335, US2006/0083780, US2013/0123338, US2015/0064242, US2006/0051405, US2013/0065939, US2006/0008910, US2003/0022649, US2010/0130588, US2013/0116307, US2010/0062967, US2013/0202684, US2014/0141070, US2014/0255472, US2014/0039032, US2018/0028664, US2016/0317458, and US2013/0195920, the contents of all of which are incorporated herein by reference in their entirety. International patent application WO 2019/131770 is also incorporated herein by reference in its entirety.

### 6. PEG Lipids

[1170] The use and inclusion of polyethylene glycol (PEG)-modified phospholipids and derivatized lipids such as derivatized ceramides (PEG-CER), including N-Octanoyl-Sphingosine-1-[Succinyl(Methoxy Polyethylene Glycol)-2000] (C8 PEG-2000 ceramide) in the liposomal and pharmaceutical compositions described herein is contemplated, preferably in combination with one or more of the compounds and lipids disclosed herein. Contemplated PEG-modified lipids include, but are not limited to, a polyethylene glycol chain of up to 5 kDa in length covalently attached to a lipid with alkyl chain(s) of C6-C20 length. In some embodiments, the PEG-modified lipid employed in the compositions and methods of the invention is 1,2-dimyristoyl-sn-glycerol, methoxypolyethylene Glycol (2000 MW PEG) “DMG-PEG2000.” The addition of PEG-modified lipids to the lipid delivery vehicle may prevent complex aggregation and may also provide a means for increasing circulation lifetime and increasing the delivery of the lipid-polynucleotide composition to the target tissues, (Klibanov et al. (1990) FEBS Letters, 268 (1): 235-237), or they may be selected to rapidly exchange out of the formulation in vivo (see U.S. Pat. No. 5,885,613). Particularly useful exchangeable lipids are PEG-ceramides having shorter acyl chains (e.g., C14 or C18). The PEG-modified phospholipid and derivatized lipids of the present invention may comprise a molar ratio from about 0% to about 20%, about 0.5% to about 20%, about 1% to about 15%, about 4% to about 10%, or about 2% of the total lipid present in a liposomal lipid nanoparticle.

[1171] In an embodiment, a PEG-modified lipid is described in International Pat. Appl. No. PCT/US2019/015913, which is incorporated herein by reference in their entirety. In an embodiment, a transfer vehicle comprises one or more PEG-modified lipids.

[1172] Non-limiting examples of PEG-modified lipids include PEG-modified phosphatidylethanolamines and phosphatidic acids, PEG-ceramide conjugates (e.g., PEG-CerC14 or PEG-CerC20), PEG-modified dialkylamines and PEG-modified 1,2-diacyloxypropan-3-amines. In some further embodiments, a PEG-modified lipid may be, e.g., PEG-c-DOMG, PEG-DMG, PEG-DLPE, PEG-DMPE, PEG-DPPC, or a PEG-DSPE.

[1173] In some still further embodiments, the PEG-modified lipid includes, but is not limited to 1,2-dimyristoyl-sn-glycerol methoxypolyethylene glycol (PEG-DMG), 1,2-distearoyl-sn-glycero-3-phosphoethanolamine-N-[amino(poly ethylene glycol)] (PEG-DSPE), PEG-disteryl glycerol (PEG-DSG), PEG-dipalmetoleyl, PEG-dioleyl, PEG-distearyl, PEG-diacylglycamide (PEG-DAG), PEG-dipalmitoyl phosphatidylethanolamine (PEG-DPPE), or PEG-1,2-dimyristyloxlpropyl-3-amine (PEG-c-DMA).

[1174] In various embodiments, a PEG-modified lipid may also be referred to as “PEGylated lipid” or “PEG-lipid.”

[1175] In one embodiment, the PEG-lipid is selected from the group consisting of a PEG-modified phosphatidylethanolamine, a PEG-modified phosphatidic acid, a PEG-modified ceramide, a PEG-modified dialkylamine, a PEG-modified diacylglycerol, a PEG-modified dialkylglycerol, and mixtures thereof.

[1176] In some embodiments, the lipid moiety of the PEG-lipids includes those having lengths of from about C₁₄ to about C₂₂, such as from about C₁₄ to about C₁₆. In some embodiments, a PEG moiety, for example a mPEG-NH₂, has a size of about 1000, about 2000, about 5000, about 10,000, about 15,000 or about 20,000 daltons. In one embodiment, the PEG-lipid is PEG2k-DMG.

[1177] In one embodiment, the lipid nanoparticles described herein can comprise a lipid modified with a non-diffusible PEG. Non-limiting examples of non-diffusible PEGs include PEG-DSG and PEG-DSPE.

[1178] PEG-lipids are known in the art, such as those described in U.S. Pat. No. 8,158,601 and International Pat. Publ. No. WO2015/130584 A2, which are incorporated herein by reference in their entirety.

[1179] In various embodiments, lipids (e.g., PEG-lipids), described herein may be synthesized as described International Pat. Publ. No. PCT/US2016/000129, which is incorporated by reference in its entirety.

[1180] The lipid component of a lipid nanoparticle composition may include one or more molecules comprising polyethylene glycol, such as PEG or PEG-modified lipids. Such species may be alternately referred to as PEGylated lipids. A PEG lipid is a lipid modified with polyethylene glycol. A PEG lipid may be selected from the non-limiting group including PEG-modified phosphatidylethanolamines, PEG-modified phosphatidic acids, PEG-modified ceramides, PEG-modified dialkylamines, PEG-modified diacylglycerols, PEG-modified dialkylglycerols, and mixtures thereof. For example, a PEG lipid may be PEG-c-DOMG, PEG-DMG, PEG-DLPE, PEG-DMPE, PEG-DPPC, or a PEG-DSPE lipid.

[1181] In some embodiments the PEG-modified lipids are a modified form of PEG-DMG. PEG-DMG has the following structure:

[chemical structure]

[1182] In some embodiments the PEG-modified lipids are a modified form of PEG-C18, or PEG-1. PEG-1 has the following structure

[chemical structure]

[1183] In one embodiment, PEG lipids useful in the present invention can be PEGylated lipids described in International Publication No. WO2012099755, the contents of which is herein incorporated by reference in its entirety. Any of these exemplary PEG lipids described herein may be modified to comprise a hydroxyl group on the PEG chain. In certain embodiments, the PEG lipid is a PEG-OH lipid. In certain embodiments, the PEG-OH lipid includes one or more hydroxyl groups on the PEG chain. In certain embodiments, a PEG-OH or hydroxy-PEGylated lipid comprises an —OH group at the terminus of the PEG chain. Each possibility represents a separate embodiment of the present invention.

[1184] In some embodiments, the PEG lipid is a compound of Formula (P1):

[chemical structure]

or a salt or isomer thereof, wherein:
r is an integer between 1 and 100;
R is C₁₀₋₄₀ alkyl, C₁₀₋₄₀ alkenyl, or C₁₀₋₄₀ alkynyl; and optionally one or more methylene groups of R are independently replaced with C₃₋₁₀ carbocyclylene, 4 to 10 membered heterocyclylene, C₆₋₁₀ arylene, 4 to 10 membered heteroarylene, —N(R^{N})—, —O—, —S—, —C(O)—, —C(O)N(R^{N})—, —NR^{N}C(O)—, —NR^{N}C(O)N(R^{N})—, —C(O)O—, —OC(O)—, —OC(O)O—, —OC(O)N(R^{N})—, —NR^{N}C(O)O—, —C(O)S—, —SC(O)—, —C(═NR^{N})—, —C(═NR^{N})N(R^{N})—, —NR^{N}C(═NR^{N})—, —NR^{N}C(═NR^{N})N(R^{N})—, —C(S)—, —C(S)N(R^{N})—, —NR^{N}C(S)—, —NR^{N}C(S)N(R^{N})—, —S(O)—, —OS(O)—, —S(O)O—, —OS(O)O—, —OS(O)₂—, —S(O)₂O—, —OS(O)₂O—, —N(R^{N})S(O)—, —S(O)N(R^{N})—, —N(R^{N})S(O)N(R^{N})—, —OS(O)N(R^{N})—, —N(R^{N})S(O)O—, —S(O)2-, —N(R^{N})S(O)2-, —S(O)₂N(R^{N})—, —N(R^{N})S(O)₂N(R^{N})—, —OS(O)₂N(R^{N})—, or —N(R^{N})S(O)₂O—; and
each instance of R^{N} is independently hydrogen, C₁₋₆ alkyl, or a nitrogen protecting group.

[1185] For example, R is C17 alkyl. For example, the PEG lipid is a compound of Formula (P1-a):

[chemical structure]

or a salt or isomer thereof, wherein r is an integer between 1 and 100.

[1186] For example, the PEG lipid is a compound of the following formula:

[chemical structure]

### 7. Helper Lipids

[1187] In some embodiments, the transfer vehicle (e.g., LNP) described herein comprises one or more non-cationic helper lipids. In some embodiments, the helper lipid is a phospholipid. In some embodiments, the helper lipid is a phospholipid substitute or replacement. In some embodiments, the phospholipid or phospholipid substitute can be, for example, one or more saturated or (poly)unsaturated phospholipids, or phospholipid substitutes, or a combination thereof. In general, phospholipids comprise a phospholipid moiety and one or more fatty acid moieties.

[1188] A phospholipid moiety can be selected, for example, from the non-limiting group consisting of phosphatidyl choline, phosphatidyl ethanolamine, phosphatidyl glycerol, phosphatidyl serine, phosphatidic acid, 2-lysophosphatidyl choline, and a sphingomyelin.

[1189] A fatty acid moiety can be selected, for example, from the non-limiting group consisting of lauric acid, myristic acid, myristoleic acid, palmitic acid, palmitoleic acid, stearic acid, oleic acid, linoleic acid, alpha-linolenic acid, erucic acid, phytanoic acid, arachidic acid, arachidonic acid, eicosapentaenoic acid, behenic acid, docosapentaenoic acid, and docosahexaenoic acid.

[1190] Phospholipids include, but are not limited to, glycerophospholipids such as phosphatidylcholines, phosphatidylethanolamines, phosphatidylserines, phosphatidylinositols, phosphatidy glycerols, and phosphatidic acids. Phospholipids also include phosphosphingolipid, such as sphingomyelin.

[1191] In some embodiments, the helper lipid is a 1,2-distearoyl-177-glycero-3-phosphocholine (DSPC) analog, a DSPC substitute, oleic acid, or an oleic acid analog.

[1192] In some embodiments, a helper lipid is a non-phosphatidyl choline (PC) zwitterionic lipid, a DSPC analog, oleic acid, an oleic acid analog, or a DSPC substitute.

[1193] In some embodiments, a helper lipid is described in PCT/US2018/053569. Helper lipids suitable for use in a lipid composition of the disclosure include, for example, a variety of neutral, uncharged or zwitterionic lipids. Such helper lipids are preferably used in combination with one or more of the compounds and lipids disclosed herein. Examples of helper lipids include, but are not limited to, 5-heptadecylbenzene-1,3-diol (resorcinol), dipalmitoylphosphatidylcholine (DPPC), distearoylphosphatidylcholine (DSPC), pohsphocholine (DOPC), dimyristoylphosphatidylcholine (DMPC), phosphatidylcholine (PLPC), 1,2-distearoylsn-glycero-3-phosphocholine (DAPC), phosphatidylethanolamine (PE), egg phosphatidylcholine (EPC), dilauryloylphosphatidylcholine (DLPC), dimyristoylphosphatidylcholine (DMPC), 1-myristoyl-2-palmitoyl phosphatidylcholine (MPPC),1-paimitoyl-2-myristoyl phosphatidylcholine (PMPC),1-palmitoyl-2-stearoyl phosphatidylcholine (PSPC), 1,2-diarachidoyl-sn-glycero-3-phosphocholine (DBPC), 1-stearoyl-2-palmitoyl phosphatidylcholine (SPPC), 1,2-dieicosenoyl-sn-glycero-3-phosphocholine (DEPC), paimitoyioieoyl phosphatidylcholine (POPC), lysophosphatidyl choline, dioleoyl phosphatidylethanol amine (DOPE) dilinoleoylphosphatidylcholine distearoylphosphatidylethanolamine (DSPE), dimyristoyl phosphatidylethanolamine (DMPE), dipalmitoylp hosphatidylethanolamine (DPPE), palmitoyloleoyl phosphatidylethanolamine (POPE), lysophosphatidylethanolamine and combinations thereof. In one embodiment, the helper lipid may be distearoylphosphatidylcholine (DSPC) or dimyristoyl phosphatidyl ethanolamine (DMPE). In another embodiment, the helper lipid may be distearoylphosphatidylcholine (DSPC). Helper lipids function to stabilize and improve processing of the transfer vehicles. Such helper lipids are preferably used in combination with other excipients, for example, one or more of the ionizable lipids disclosed herein. In some embodiments, when used in combination with an ionizable lipid, the helper lipid may comprise a molar ratio of 5% to about 90%, or about 10% to about 70% of the total lipid present in the lipid nanoparticle.

### 8. Structural Lipids

[1194] In an embodiment, a structural lipid is described in international patent application PCT/US2019/015913.

[1195] The transfer vehicles described herein comprise one or more structural lipids. Incorporation of structural lipids in the lipid nanoparticle may help mitigate aggregation of other lipids in the particle. Structural lipids can include, but are not limited to, cholesterol, fecosterol, ergosterol, bassicasterol, tomatidine, tomatine, ursolic, alpha-tocopherol, and mixtures thereof. In certain embodiments, the structural lipid is cholesterol. In certain embodiments, the structural lipid includes cholesterol and a corticosteroid (such as, for example, prednisolone, dexamethasone, prednisone, and hydrocortisone), or a combination thereof.

[1196] In some embodiments, the structural lipid is a sterol. In certain embodiments, the structural lipid is a steroid. In certain embodiments, the structural lipid is cholesterol. In certain embodiments, the structural lipid is an analog of cholesterol. In certain embodiments, the structural lipid is alpha-tocopherol.

[1197] The transfer vehicles described herein comprise one or more structural lipids. Incorporation of structural lipids in a transfer vehicle, e.g., a lipid nanoparticle, may help mitigate aggregation of other lipids in the particle. In certain embodiments, the structural lipid includes cholesterol and a corticosteroid (such as, for example, prednisolone, dexamethasone, prednisone, and hydrocortisone), or a combination thereof.

[1198] In some embodiments, the structural lipid is a sterol. Structural lipids can include, but are not limited to, sterols (e.g., phytosterols or zoosterols).

[1199] In certain embodiments, the structural lipid is a steroid. For example, sterols can include, but are not limited to, cholesterol, β-sitosterol, fecosterol, ergosterol, sitosterol, campesterol, stigmasterol, brassicasterol, ergosterol, tomatidine, tomatine, ursolic acid, or alpha-tocopherol.

[1200] In some embodiments, a transfer vehicle includes an effective amount of an immune cell delivery potentiating lipid, e.g., a cholesterol analog or an amino lipid or combination thereof, that, when present in a transfer vehicle, e.g., an lipid nanoparticle, may function by enhancing cellular association and/or uptake, internalization, intracellular trafficking and/or processing, and/or endosomal escape and/or may enhance recognition by and/or binding to immune cells, relative to a transfer vehicle lacking the immune cell delivery potentiating lipid. Accordingly, while not intending to be bound by any particular mechanism or theory, in one embodiment, a structural lipid or other immune cell delivery potentiating lipid of the disclosure binds to C1q or promotes the binding of a transfer vehicle comprising such lipid to C1q. Thus, for in vitro use of the transfer vehicles of the disclosure for delivery of a nucleic acid molecule to an immune cell, culture conditions that include C1q are used (e.g., use of culture media that includes serum or addition of exogenous C1q to serum-free media). For in vivo use of the transfer vehicles of the disclosure, the requirement for C1q is supplied by endogenous C1q.

[1201] In certain embodiments, the structural lipid is cholesterol. In certain embodiments, the structural lipid is an analog of cholesterol. In some embodiments, the structural lipid is a lipid in Table 16:

TABLE 16

| CMPD | |
|---|---|
| No. S— | Structure |
| 1 | [chemical structure] |
| 2 | [chemical structure] |
| 3 | [chemical structure] |
| 4 | [chemical structure] |
| 5 | [chemical structure] |
| 6 | [chemical structure] |
| 7 | [chemical structure] |
| 8 | [chemical structure] |
| 9 | [chemical structure] |
| 10 | [chemical structure] |
| 11 | [chemical structure] |
| 12 | [chemical structure] |
| 13 | [chemical structure] |
| 14 | [chemical structure] |
| 15 | [chemical structure] |
| 16 | [chemical structure] |
| 17 | [chemical structure] |
| 18 | [chemical structure] |
| 19 | [chemical structure] |
| 20 | [chemical structure] |
| 21 | [chemical structure] |
| 150 | [chemical structure] |
| 154 | [chemical structure] |
| 162 | [chemical structure] |
| 163 | [chemical structure] |
| 164 | [chemical structure] |
| 184 | [chemical structure] |
| 22 | [chemical structure] |
| 23 | [chemical structure] |
| 24 | [chemical structure] |
| 25 | [chemical structure] |
| 26 | [chemical structure] |
| 27 | [chemical structure] |
| 28 | [chemical structure] |
| 29 | [chemical structure] |
| 30 | [chemical structure] |
| 31 | [chemical structure] |
| 32 | [chemical structure] |
| 33 | [chemical structure] |
| 34 | [chemical structure] |
| 35 | [chemical structure] |
| 36 | [chemical structure] |
| 37 | [chemical structure] |
| 38 | [chemical structure] |
| 39 | [chemical structure] |
| 40 | [chemical structure] |
| 41 | [chemical structure] |
| 42 | [chemical structure] |
| 165 | [chemical structure] |
| 169 | [chemical structure] |
| 170 | [chemical structure] |
| 171 | [chemical structure] |
| 172 | [chemical structure] |
| 43 | [chemical structure] |
| 44 | [chemical structure] |
| 45 | [chemical structure] |
| 46 | [chemical structure] |
| 175 | [chemical structure] |
| 176 | [chemical structure] |
| 51 | [chemical structure] |
| 52 | [chemical structure] |
| 53 | [chemical structure] |
| 54 | [chemical structure] |
| 55 | [chemical structure] |
| 56 | [chemical structure] |
| 57 | [chemical structure] |
| 58 | [chemical structure] |
| 59 | [chemical structure] |
| 153 | [chemical structure] |
| 47 | [chemical structure] |
| 48 | [chemical structure] |
| 49 | [chemical structure] |
| 50 | [chemical structure] |
| 177 | [chemical structure] |
| 178 | [chemical structure] |
| 60 | [chemical structure] |
| 61 | [chemical structure] |
| 62 | [chemical structure] |
| 63 | [chemical structure] |
| 64 | [chemical structure] |
| 65 | [chemical structure] |
| 66 | [chemical structure] |
| 67 | [chemical structure] |
| 149 | [chemical structure] |
| 68 | [chemical structure] |
| 69 | [chemical structure] |
| 70 | [chemical structure] |
| 71 | [chemical structure] |
| 72 | [chemical structure] |
| 73 | [chemical structure] |
| 74 | [chemical structure] |
| 75 | [chemical structure] |
| 76 | [chemical structure] |
| 77 | [chemical structure] |
| 78 | [chemical structure] |
| 79 | [chemical structure] |
| 80 | [chemical structure] |
| 81 | [chemical structure] |
| 82 | [chemical structure] |
| 83 | [chemical structure] |
| 84 | [chemical structure] |
| 85 | [chemical structure] |
| 86 | [chemical structure] |
| 87 | [chemical structure] |
| 152 | [chemical structure] |
| 157 | [chemical structure] |
| 88 | [chemical structure] |
| 89 | [chemical structure] |
| 90 | [chemical structure] |
| 91 | [chemical structure] |
| 93 | [chemical structure] |
| 94 | [chemical structure] |
| 95 | [chemical structure] |
| 96 | [chemical structure] |
| 92 | [chemical structure] |
| 98 | [chemical structure] |
| 99 | [chemical structure] |
| 100 | [chemical structure] |
| 101 | [chemical structure] |
| 97 | [chemical structure] |
| 102 | [chemical structure] |
| 103 | [chemical structure] |
| 104 | [chemical structure] |
| 105 | [chemical structure] |
| 180 | [chemical structure] |
| 181 | [chemical structure] |
| 182 | [chemical structure] |
| 106 | [chemical structure] |
| 107 | [chemical structure] |
| 108 | [chemical structure] |
| 109 | [chemical structure] |
| 110 | [chemical structure] |
| 111 | [chemical structure] |
| 112 | [chemical structure] |
| 113 | [chemical structure] |
| 114 | [chemical structure] |
| 115 | [chemical structure] |
| 116 | [chemical structure] |
| 117 | [chemical structure] |
| 118 | [chemical structure] |
| 119 | [chemical structure] |
| 120 | [chemical structure] |
| 156 | [chemical structure] |
| 158 | [chemical structure] |
| 160 | [chemical structure] |
| 161 | [chemical structure] |
| 166 | [chemical structure] |
| 121 | [chemical structure] |
| 122 | [chemical structure] |
| 123 | [chemical structure] |
| 124 | [chemical structure] |
| 125 | [chemical structure] |
| 126 | [chemical structure] |
| 127 | [chemical structure] |
| 128 | [chemical structure] |
| 129 | [chemical structure] |
| 130 | [chemical structure] |
| 155 | [chemical structure] |
| 167 | [chemical structure] |
| 168 | [chemical structure] |
| 173 | [chemical structure] |
| 174 | [chemical structure] |
| 179 | [chemical structure] |
| 131 | [chemical structure] |
| 132 | [chemical structure] |
| 133 | [chemical structure] |
| 134 | [chemical structure] |
| 135 | [chemical structure] |
| 136 | [chemical structure] |
| 137 | [chemical structure] |
| 138 | [chemical structure] |
| 139 | [chemical structure] |
| 140 | [chemical structure] |
| 141 | [chemical structure] |
| 159 | [chemical structure] |
| 142 | [chemical structure] |
| 143 | [chemical structure] |
| 144 | [chemical structure] |
| 145 | [chemical structure] |
| 146 | [chemical structure] |
| 147 | [chemical structure] |
| 148 | [chemical structure] |
| 151 | [chemical structure] |
| 183 | [chemical structure] |
| | [chemical structure] |
| | [chemical structure] |
| | [chemical structure] |

### 9. LNP Formulations

[1202] The formation of a lipid nanoparticle (LNP) described herein may be accomplished by any methods known in the art. For example, as described in U.S. Pat. Pub. No. US2012/0178702 A1, which is incorporated herein by reference in its entirety. Non-limiting examples of lipid nanoparticle compositions and methods of making them are described, for example, in Semple et al. (2010) Nat. Biotechnol. 28:172-176; Jayarama et al. (2012), Angew. Chem. Int. Ed., 51:8529-8533; and Maier et al. (2013) Molecular Therapy 21, 1570-1578 (the contents of each of which are incorporated herein by reference in their entirety).

[1203] In one embodiment, the LNP formulation may be prepared by, e.g., the methods described in International Pat. Pub. No. WO 2011/127255 or WO 2008/103276, the contents of each of which are herein incorporated by reference in their entirety.

[1204] In one embodiment, LNP formulations described herein may comprise a polycationic composition. As a non-limiting example, the polycationic composition may be a composition selected from Formulae 1-60 of U.S. Pat. Pub. No. US2005/0222064 A1, the content of which is herein incorporated by reference in its entirety.

[1205] In one embodiment, the lipid nanoparticle may be formulated by the methods described in U.S. Pat. Pub. No. US2013/0156845 A1, and International Pat. Pub. No. WO2013/093648 A2 or WO2012/024526 A2, each of which is herein incorporated by reference in its entirety.

[1206] In one embodiment, the lipid nanoparticles described herein may be made in a sterile environment by the system and/or methods described in U.S. Pat. Pub. No. US2013/0164400 A1, which is incorporated herein by reference in its entirety.

[1207] In one embodiment, the LNP formulation may be formulated in a nanoparticle such as a nucleic acid-lipid particle described in U.S. Pat. No. 8,492,359, which is incorporated herein by reference in its entirety.

[1208] A nanoparticle composition may optionally comprise one or more coatings. For example, a nanoparticle composition may be formulated in a capsule, film, or tablet having a coating. A capsule, film, or tablet including a composition described herein may have any useful size, tensile strength, hardness, or density.

[1209] In some embodiments, the lipid nanoparticles described herein may be synthesized using methods comprising microfluidic mixers. Exemplary microfluidic mixers may include, but are not limited to, a slit interdigitial micromixer including, but not limited to, those manufactured by Precision Nanosystems (Vancouver, BC, Canada), Microinnova (Allerheiligen bei Wildon, Austria) and/or a staggered herringbone micromixer (SHM) (Zhigaltsev, I. V. et al. (2012) Langmuir. 28:3633-40; Belliveau, N. M. et al. Mol. Ther. Nucleic. Acids. (2012) 1:e37; Chen, D. et al. J. Am. Chem. Soc. (2012) 134(16):6948-51; each of which is herein incorporated by reference in its entirety).

[1210] In some embodiments, methods of LNP generation comprising SHM, further comprise the mixing of at least two input streams wherein mixing occurs by microstructure-induced chaotic advection (MICA). According to this method, fluid streams flow through channels present in a herringbone pattern causing rotational flow and folding the fluids around each other. This method may also comprise a surface for fluid mixing wherein the surface changes orientations during fluid cycling. Methods of generating LNPs using SHM include those disclosed in U.S. Pat. Pub. Nos. US2004/0262223 A1 and US2012/0276209 A1, each of which is incorporated herein by reference in their entirety.

[1211] In one embodiment, the lipid nanoparticles may be formulated using a micromixer such as, but not limited to, a Slit Interdigital Microstructured Mixer (SIMM-V2) or a Standard Slit Interdigital Micro Mixer (SSIMM) or Caterpillar (CPMM) or Impinging-jet (IJMM) from the Institut fur Mikrotechnik Mainz GmbH, Mainz Germany). In one embodiment, the lipid nanoparticles are created using microfluidic technology (see, Whitesides (2006) Nature. 442: 368-373; and Abraham et al. (2002) Science. 295: 647-651; each of which is herein incorporated by reference in its entirety). As a non-limiting example, controlled microfluidic formulation includes a passive method for mixing streams of steady pressure-driven flows in micro channels at a low Reynolds number (see, e.g., Abraham et al. (2002) Science. 295: 647651; which is herein incorporated by reference in its entirety).

[1212] In one embodiment, the circRNA of the present invention may be formulated in lipid nanoparticles created using a micromixer chip such as, but not limited to, those from Harvard Apparatus (Holliston, Mass.), Dolomite Microfluidics (Royston, UK), or Precision Nanosystems (Van Couver, BC, Canada). A micromixer chip can be used for rapid mixing of two or more fluid streams with a split and recombine mechanism.

[1213] In one embodiment, the lipid nanoparticles may have a diameter from about 10 to about 100 nm such as, but not limited to, about 10 to about 20 nm, about 10 to about 30 nm, about 10 to about 40 nm, about 10 to about 50 nm, about 10 to about 60 nm, about 10 to about 70 nm, about 10 to about 80 nm, about 10 to about 90 nm, about 20 to about 30 nm, about 20 to about 40 nm, about 20 to about 50 nm, about 20 to about 60 nm, about 20 to about 70 nm, about 20 to about 80 nm, about 20 to about 90 nm, about 20 to about 100 nm, about 30 to about 40 nm, about 30 to about 50 nm, about 30 to about 60 nm, about 30 to about 70 nm, about 30 to about 80 nm, about 30 to about 90 nm, about 30 to about 100 nm, about 40 to about 50 nm, about 40 to about 60 nm, about 40 to about 70 nm, about 40 to about 80 nm, about 40 to about 90 nm, about 40 to about 100 nm, about 50 to about 60 nm, about 50 to about 70 nm about 50 to about 80 nm, about 50 to about 90 nm, about 50 to about 100 nm, about 60 to about 70 nm, about 60 to about 80 nm, about 60 to about 90 nm, about 60 to about 100 nm, about 70 to about 80 nm, about 70 to about 90 nm, about 70 to about 100 nm, about 80 to about 90 nm, about 80 to about 100 nm and/or about 90 to about 100 nm. In one embodiment, the lipid nanoparticles may have a diameter from about 10 to 500 nm. In one embodiment, the lipid nanoparticle may have a diameter greater than 100 nm, greater than 150 nm, greater than 200 nm, greater than 250 nm, greater than 300 nm, greater than 350 nm, greater than 400 nm, greater than 450 nm, greater than 500 nm, greater than 550 nm, greater than 600 nm, greater than 650 nm, greater than 700 nm, greater than 750 nm, greater than 800 nm, greater than 850 nm, greater than 900 nm, greater than 950 nm or greater than 1000 nm. Each possibility represents a separate embodiment of the present invention.

[1214] In some embodiments, a nanoparticle (e.g., a lipid nanoparticle) has a mean diameter of 10-500 nm, 20-400 nm, 30-300 nm, or 40-200 nm. In some embodiments, a nanoparticle (e.g., a lipid nanoparticle) has a mean diameter of 50-150 nm, 50-200 nm, 80-100 nm, or 80-200 nm.

[1215] In some embodiments, the lipid nanoparticles described herein can have a diameter from below 0.1 μm to up to 1 mm such as, but not limited to, less than 0.1 μm, less than 1.0 μm, less than 5 μm, less than 10 μm, less than 15 μm, less than 20 μm, less than 25 μm, less than 30 μm, less than 35 μm, less than 40 μm, less than 50 μm, less than 55 μm, less than 60 μm, less than 65 μm, less than 70 μm, less than 75 μm, less than 80 μm, less than 85 μm, less than 90 μm, less than 95 μm, less than 100 μm, less than 125 μm, less than 150 μm, less than 175 μm, less than 200 μm, less than 225 μm, less than 250 μm, less than 275 μm, less than 300 μm, less than 325 μm, less than 350 μm, less than 375 μm, less than 400 μm, less than 425 μm, less than 450 μm, less than 475 μm, less than 500 μm, less than 525 μm, less than 550 μm, less than 575 μm, less than 600 μm, less than 625 μm, less than 650 μm, less than 675 μm, less than 700 μm, less than 725 μm, less than 750 μm, less than 775 μm, less than 800 μm, less than 825 μm, less than 850 μm, less than 875 μm, less than 900 μm, less than 925 μm, less than 950 μm, less than 975 μm.

[1216] In another embodiment, LNPs may have a diameter from about 1 nm to about 100 nm, from about 1 nm to about 10 nm, about 1 nm to about 20 nm, from about 1 nm to about 30 nm, from about 1 nm to about 40 nm, from about 1 nm to about 50 nm, from about 1 nm to about 60 nm, from about 1 nm to about 70 nm, from about 1 nm to about 80 nm, from about 1 nm to about 90 nm, from about 5 nm to about from 100 nm, from about 5 nm to about 10 nm, about 5 nm to about 20 nm, from about 5 nm to about 30 nm, from about 5 nm to about 40 nm, from about 5 nm to about 50 nm, from about 5 nm to about 60 nm, from about 5 nm to about 70 nm, from about 5 nm to about 80 nm, from about 5 nm to about 90 nm, about 10 to about 50 nM, from about 20 to about 50 nm, from about 30 to about 50 nm, from about 40 to about 50 nm, from about 20 to about 60 nm, from about 30 to about 60 nm, from about 40 to about 60 nm, from about 20 to about 70 nm, from about 30 to about 70 nm, from about 40 to about 70 nm, from about 50 to about 70 nm, from about 60 to about 70 nm, from about 20 to about 80 nm, from about 30 to about 80 nm, from about 40 to about 80 nm, from about 50 to about 80 nm, from about 60 to about 80 nm, from about 20 to about 90 nm, from about 30 to about 90 nm, from about 40 to about 90 nm, from about 50 to about 90 nm, from about 60 to about 90 nm and/or from about 70 to about 90 nm. Each possibility represents a separate embodiment of the present invention.

[1217] A nanoparticle composition may be relatively homogenous. A polydispersity index may be used to indicate the homogeneity of a nanoparticle composition, e.g., the particle size distribution of the nanoparticle compositions. A small (e.g., less than 0.3) polydispersity index generally indicates a narrow particle size distribution. A nanoparticle composition may have a polydispersity index from about 0 to about 0.25, such as 0.01, 0.02, 0.03, 0.04, 0.05, 0.06, 0.07, 0.08, 0.09, 0.10, 0.1, 1, 0.12, 0.13, 0.14, 0.15, 0.16, 0.17, 0.18, 0.19, 0.20, 0.21, 0.22, 0.23, 0.24, or 0.25. In some embodiments, the polydispersity index of a nanoparticle composition may be from about 0.10 to about 0.20. Each possibility represents a separate embodiment of the present invention.

[1218] The zeta potential of a nanoparticle composition may be used to indicate the electrokinetic potential of the composition. For example, the zeta potential may describe the surface charge of a nanoparticle composition. Nanoparticle compositions with relatively low charges, positive or negative, are generally desirable, as more highly charged species may interact undesirably with cells, tissues, and other elements in the body. In some embodiments, the zeta potential of a nanoparticle composition may be from about −20 mV to about +20 mV, from about −20 mV to about +15 mV, from about −20 mV to about +10 mV, from about −20 mV to about +5 mV, from about −20 mV to about 0 mV, from about −20 mV to about −5 mV, from about −20 mV to about −10 mV, from about −20 mV to about −15 mV from about −20 mV to about +20 mV, from about −20 mV to about +15 mV, from about −20 mV to about +10 mV, from about −20 mV to about +5 mV, from about −20 mV to about 0 mV, from about 0 mV to about +20 mV, from about 0 mV to about +15 mV, from about 0 mV to about +10 mV, from about 0 mV to about +5 mV, from about +5 mV to about +20 mV, from about +5 mV to about +15 mV, or from about +5 mV to about +10 mV. Each possibility represents a separate embodiment of the present invention.

[1219] The efficiency of encapsulation of a therapeutic agent describes the amount of therapeutic agent that is encapsulated or otherwise associated with a nanoparticle composition after preparation, relative to the initial amount provided. The encapsulation efficiency is desirably high (e.g., close to 100%). The encapsulation efficiency may be measured, for example, by comparing the amount of therapeutic agent in a solution containing the nanoparticle composition before and after breaking up the nanoparticle composition with one or more organic solvents or detergents. Fluorescence may be used to measure the amount of free therapeutic agent (e.g., nucleic acids) in a solution. For the nanoparticle compositions described herein, the encapsulation efficiency of a therapeutic agent may be at least 50%, for example 50%, 55%, 60%, 65%, 70%, 75%, 80%, 85%, 90%, 91%, 92%, 93%, 94%, 95%, 96%, 97%, 98%, 99%, or 100%. In some embodiments, the encapsulation efficiency may be at least 80%. In certain embodiments, the encapsulation efficiency may be at least 90%. Each possibility represents a separate embodiment of the present invention. In some embodiments, the lipid nanoparticle has a polydiversity value of less than 0.4. In some embodiments, the lipid nanoparticle has a net neutral charge at a neutral pH. In some embodiments, the lipid nanoparticle has a mean diameter of 50-200 nm.

[1220] The properties of a lipid nanoparticle formulation may be influenced by factors including, but not limited to, the selection of the cationic lipid component, the degree of cationic lipid saturation, the selection of the non-cationic lipid component, the degree of noncationic lipid saturation, the selection of the structural lipid component, the nature of the PEGylation, ratio of all components and biophysical parameters such as size. As described herein, the purity of a PEG lipid component is also important to an LNP's properties and performance.

### 10. Methods

[1221] In one embodiment, a lipid nanoparticle formulation may be prepared by the methods described in International Publication Nos. WO2011127255 or WO2008103276, each of which is herein incorporated by reference in their entirety. In some embodiments, lipid nanoparticle formulations may be as described in International Publication No. WO2019131770, which is herein incorporated by reference in its entirety.

[1222] In some embodiments, circular RNA is formulated according to a process described in U.S. patent application Ser. No. 15/809,680. In some embodiments, the present invention provides a process of encapsulating circular RNA in transfer vehicles comprising the steps of forming lipids into pre-formed transfer vehicles (i.e. formed in the absence of RNA) and then combining the pre-formed transfer vehicles with RNA. In some embodiments, the novel formulation process results in an RNA formulation with higher potency (peptide or protein expression) and higher efficacy (improvement of a biologically relevant endpoint) both in vitro and in vivo with potentially better tolerability as compared to the same RNA formulation prepared without the step of preforming the lipid nanoparticles (e.g., combining the lipids directly with the RNA).

[1223] For certain cationic lipid nanoparticle formulations of RNA, in order to achieve high encapsulation of RNA, the RNA in buffer (e.g., citrate buffer) has to be heated. In those processes or methods, the heating is required to occur before the formulation process (i.e. heating the separate components) as heating post-formulation (post-formation of nanoparticles) does not increase the encapsulation efficiency of the RNA in the lipid nanoparticles. In contrast, in some embodiments of the novel processes of the present invention, the order of heating of RNA does not appear to affect the RNA encapsulation percentage. In some embodiments, no heating (i.e. maintaining at ambient temperature) of one or more of the solutions comprising the pre-formed lipid nanoparticles, the solution comprising the RNA and the mixed solution comprising the lipid nanoparticle encapsulated RNA is required to occur before or after the formulation process.

[1224] RNA may be provided in a solution to be mixed with a lipid solution such that the RNA may be encapsulated in lipid nanoparticles. A suitable RNA solution may be any aqueous solution containing RNA to be encapsulated at various concentrations. For example, a suitable RNA solution may contain an RNA at a concentration of or greater than about 0.01 mg/ml, 0.05 mg/ml, 0.06 mg/ml, 0.07 mg/ml, 0.08 mg/ml, 0.09 mg/ml, 0.1 mg/ml, 0.15 mg/ml, 0.2 mg/ml, 0.3 mg/ml, 0.4 mg/ml, 0.5 mg/ml, 0.6 mg/ml, 0.7 mg/ml, 0.8 mg/ml, 0.9 mg/ml, or 1.0 mg/ml. In some embodiments, a suitable RNA solution may contain an RNA at a concentration in a range from about 0.01-1.0 mg/ml, 0.01-0.9 mg/ml, 0.01-0.8 mg/ml, 0.01-0.7 mg/ml, 0.01-0.6 mg/ml, 0.01-0.5 mg/ml, 0.01-0.4 mg/ml, 0.01-0.3 mg/ml, 0.01-0.2 mg/ml, 0.01-0.1 mg/ml, 0.05-1.0 mg/ml, 0.05-0.9 mg/ml, 0.05-0.8 mg/ml, 0.05-0.7 mg/ml, 0.05-0.6 mg/ml, 0.05-0.5 mg/ml, 0.05-0.4 mg/ml, 0.05-0.3 mg/ml, 0.05-0.2 mg/ml, 0.05-0.1 mg/ml, 0.1-1.0 mg/ml, 0.2-0.9 mg/ml, 0.3-0.8 mg/ml, 0.4-0.7 mg/ml, or 0.5-0.6 mg/ml.

[1225] Typically, a suitable RNA solution may also contain a buffering agent and/or salt. Generally, buffering agents can include HEPES, Tris, ammonium sulfate, sodium bicarbonate, sodium citrate, sodium acetate, potassium phosphate or sodium phosphate. In some embodiments, suitable concentration of the buffering agent may be in a range from about 0.1 mM to 100 mM, 0.5 mM to 90 mM, 1.0 mM to 80 mM, 2 mM to 70 mM, 3 mM to 60 mM, 4 mM to 50 mM, 5 mM to 40 mM, 6 mM to 30 mM, 7 mM to 20 mM, 8 mM to 15 mM, or 9 to 12 mM.

[1226] Exemplary salts can include sodium chloride, magnesium chloride, and potassium chloride. In some embodiments, suitable concentration of salts in an RNA solution may be in a range from about 1 mM to 500 mM, 5 mM to 400 mM, 10 mM to 350 mM, 15 mM to 300 mM, 20 mM to 250 mM, 30 mM to 200 mM, 40 mM to 190 mM, 50 mM to 180 mM, 50 mM to 170 mM, 50 mM to 160 mM, 50 mM to 150 mM, or 50 mM to 100 mM.

[1227] In some embodiments, a suitable RNA solution may have a pH in a range from about 3.5-6.5, 3.5-6.0, 3.5-5.5, 3.5-5.0, 3.5-4.5, 4.0-5.5, 4.0-5.0, 4.0-4.9, 4.0-4.8, 4.0-4.7, 4.0-4.6, or 4.0-4.5.

[1228] Various methods may be used to prepare an RNA solution suitable for the present invention. In some embodiments, RNA may be directly dissolved in a buffer solution described herein. In some embodiments, an RNA solution may be generated by mixing an RNA stock solution with a buffer solution prior to mixing with a lipid solution for encapsulation. In some embodiments, an RNA solution may be generated by mixing an RNA stock solution with a buffer solution immediately before mixing with a lipid solution for encapsulation.

[1229] According to the present invention, a lipid solution contains a mixture of lipids suitable to form transfer vehicles for encapsulation of RNA. In some embodiments, a suitable lipid solution is ethanol based. For example, a suitable lipid solution may contain a mixture of desired lipids dissolved in pure ethanol (i.e. 100% ethanol). In another embodiment, a suitable lipid solution is isopropyl alcohol based. In another embodiment, a suitable lipid solution is dimethylsulfoxide-based. In another embodiment, a suitable lipid solution is a mixture of suitable solvents including, but not limited to, ethanol, isopropyl alcohol and dimethylsulfoxide.

[1230] A suitable lipid solution may contain a mixture of desired lipids at various concentrations. In some embodiments, a suitable lipid solution may contain a mixture of desired lipids at a total concentration in a range from about 0.1-100 mg/ml, 0.5-90 mg/ml, 1.0-80 mg/ml, 1.0-70 mg/ml, 1.0-60 mg/ml, 1.0-50 mg/ml, 1.0-40 mg/ml, 1.0-30 mg/ml, 1.0-20 mg/ml, 1.0-15 mg/ml, 1.0-10 mg/ml, 1.0-9 mg/ml, 1.0-8 mg/ml, 1.0-7 mg/ml, 1.0-6 mg/ml, or 1.0-5 mg/ml.

### 11. Targeting

[1231] The present invention also contemplates the discriminatory targeting of target cells and tissues by both passive and active targeting means. The phenomenon of passive targeting exploits the natural distributions patterns of a transfer vehicle in vivo without relying upon the use of additional excipients or means to enhance recognition of the transfer vehicle by target cells. For example, transfer vehicles which are subject to phagocytosis by the cells of the reticulo-endothelial system are likely to accumulate in the liver or spleen, and accordingly may provide a means to passively direct the delivery of the compositions to such target cells.

[1232] Alternatively, the present invention contemplates active targeting, which involves the use of targeting moieties that may be bound (either covalently or non-covalently) to the transfer vehicle to encourage localization of such transfer vehicle at certain target cells or target tissues. For example, targeting may be mediated by the inclusion of one or more endogenous targeting moieties in or on the transfer vehicle to encourage distribution to the target cells or tissues. Recognition of the targeting moiety by the target tissues actively facilitates tissue distribution and cellular uptake of the transfer vehicle and/or its contents in the target cells and tissues (e.g., the inclusion of an apolipoprotein-E targeting ligand in or on the transfer vehicle encourages recognition and binding of the transfer vehicle to endogenous low density lipoprotein receptors expressed by hepatocytes). As provided herein, the composition can comprise a moiety capable of enhancing affinity of the composition to the target cell. Targeting moieties may be linked to the outer bilayer of the lipid particle during formulation or post-formulation. These methods are well known in the art. In addition, some lipid particle formulations may employ fusogenic polymers such as PEAA, hemagluttinin, other lipopeptides (see U.S. patent application Ser. No. 08/835,281, and 60/083,294, which are incorporated herein by reference) and other features useful for in vivo and/or intracellular delivery. In other some embodiments, the compositions of the present invention demonstrate improved transfection efficacies, and/or demonstrate enhanced selectivity towards target cells or tissues of interest. Contemplated therefore are compositions which comprise one or more moieties (e.g., peptides, aptamers, oligonucleotides, a vitamin or other molecules) that are capable of enhancing the affinity of the compositions and their nucleic acid contents for the target cells or tissues. Suitable moieties may optionally be bound or linked to the surface of the transfer vehicle. In some embodiments, the targeting moiety may span the surface of a transfer vehicle or be encapsulated within the transfer vehicle. Suitable moieties and are selected based upon their physical, chemical or biological properties (e.g., selective affinity and/or recognition of target cell surface markers or features). Cell-specific target sites and their corresponding targeting ligand can vary widely. Suitable targeting moieties are selected such that the unique characteristics of a target cell are exploited, thus allowing the composition to discriminate between target and non-target cells. For example, compositions of the invention may include surface markers (e.g., apolipoprotein-B or apolipoprotein-E) that selectively enhance recognition of, or affinity to hepatocytes (e.g., by receptor-mediated recognition of and binding to such surface markers). As an example, the use of galactose as a targeting moiety would be expected to direct the compositions of the present invention to parenchymal hepatocytes, or alternatively the use of mannose containing sugar residues as a targeting ligand would be expected to direct the compositions of the present invention to liver endothelial cells (e.g., mannose containing sugar residues that may bind preferentially to the asialoglycoprotein receptor present in hepatocytes). (See Hillery A M, et al. “Drug Delivery and Targeting: For Pharmacists and Pharmaceutical Scientists” (2002) Taylor & Francis, Inc.) The presentation of such targeting moieties that have been conjugated to moieties present in the transfer vehicle (e.g., a lipid nanoparticle) therefore facilitate recognition and uptake of the compositions of the present invention in target cells and tissues. Examples of suitable targeting moieties include one or more peptides, proteins, aptamers, vitamins and oligonucleotides.

[1233] In particular embodiments, a transfer vehicle comprises a targeting moiety. In some embodiments, the targeting moiety mediates receptor-mediated endocytosis selectively into a specific population of cells. In some embodiments, the targeting moiety is capable of binding to a T cell antigen. In some embodiments, the targeting moiety is capable of binding to a NK, NKT, or macrophage antigen. In some embodiments, the targeting moiety is capable of binding to a protein selected from the group CD3, CD4, CD8, PD-1, 4-1BB, and CD2. In some embodiments, the targeting moiety is an single chain Fv (scFv) fragment, nanobody, peptide, peptide-based macrocycle, minibody, heavy chain variable region, light chain variable region or fragment thereof. In some embodiments, the targeting moiety is selected from T-cell receptor motif antibodies, T-cell α chain antibodies, T-cell β chain antibodies, T-cell γ chain antibodies, T-cell δ chain antibodies, CCR7 antibodies, CD3 antibodies, CD4 antibodies, CD5 antibodies, CD7 antibodies, CD8 antibodies, CD11b antibodies, CD11c antibodies, CD16 antibodies, CD19 antibodies, CD20 antibodies, CD21 antibodies, CD22 antibodies, CD25 antibodies, CD28 antibodies, CD34 antibodies, CD35 antibodies, CD40 antibodies, CD45RA antibodies, CD45RO antibodies, CD52 antibodies, CD56 antibodies, CD62L antibodies, CD68 antibodies, CD80 antibodies, CD95 antibodies, CD117 antibodies, CD127 antibodies, CD133 antibodies, CD137 (4-1BB) antibodies, CD163 antibodies, F4/80 antibodies, IL-4Rα antibodies, Sca-1 antibodies, CTLA-4 antibodies, GITR antibodies GARP antibodies, LAP antibodies, granzyme B antibodies, LFA-1 antibodies, transferrin receptor antibodies, and fragments thereof. In some embodiments, the targeting moiety is a small molecule binder of an ectoenzyme on lymphocytes. Small molecule binders of ectoenzymes include A2A inhibitors CD73 inhibitors, CD39 or adesines receptors A2aR and A2bR. Potential small molecules include AB928.

[1234] In some embodiments, transfer vehicles are formulated and/or targeted as described in Shobaki N, Sato Y, Harashima H. Mixing lipids to manipulate the ionization status of lipid nanoparticles for specific tissue targeting. Int J Nanomedicine. 2018; 13:8395-8410. Published 2018 Dec. 10. In some embodiments, a transfer vehicle is made up of 3 lipid types. In some embodiments, a transfer vehicle is made up of 4 lipid types. In some embodiments, a transfer vehicle is made up of 5 lipid types. In some embodiments, a transfer vehicle is made up of 6 lipid types.

### 12. Target Cells

[1235] Where it is desired to deliver a nucleic acid to an immune cell, the immune cell represents the target cell. In some embodiments, the compositions of the invention transfect the target cells on a discriminatory basis (i.e., do not transfect non-target cells). The compositions of the invention may also be prepared to preferentially target a variety of target cells, which include, but are not limited to, T cells, B cells, macrophages, and dentritic cells.

[1236] In some embodiments, the target cells are deficient in a protein or enzyme of interest. For example, where it is desired to deliver a nucleic acid to a hepatocyte, the hepatocyte represents the target cell. In some embodiments, the compositions of the invention transfect the target cells on a discriminatory basis (i.e., do not transfect non-target cells). The compositions of the invention may also be prepared to preferentially target a variety of target cells, which include, but are not limited to, hepatocytes, epithelial cells, hematopoietic cells, epithelial cells, endothelial cells, lung cells, bone cells, stem cells, mesenchymal cells, neural cells (e.g., meninges, astrocytes, motor neurons, cells of the dorsal root ganglia and anterior horn motor neurons), photoreceptor cells (e.g., rods and cones), retinal pigmented epithelial cells, secretory cells, cardiac cells, adipocytes, vascular smooth muscle cells, cardiomyocytes, skeletal muscle cells, beta cells, pituitary cells, synovial lining cells, ovarian cells, testicular cells, fibroblasts, B cells, T cells, reticulocytes, leukocytes, granulocytes and tumor cells.

[1237] The compositions of the invention may be prepared to preferentially distribute to target cells such as in the heart, lungs, kidneys, liver, and spleen. In some embodiments, the compositions of the invention distribute into the cells of the liver or spleen to facilitate the delivery and the subsequent expression of the circRNA comprised therein by the cells of the liver (e.g., hepatocytes) or the cells of spleen (e.g., immune cells). The targeted cells may function as a biological “reservoir” or “depot” capable of producing, and systemically excreting a functional protein or enzyme. Accordingly, in one embodiment of the invention the transfer vehicle may target hepatocytes or immune cells and/or preferentially distribute to the cells of the liver or spleen upon delivery. In an embodiment, following transfection of the target hepatocytes or immune cells, the circRNA loaded in the vehicle are translated and a functional protein product is produced, excreted and systemically distributed. In other embodiments, cells other than hepatocytes (e.g., lung, spleen, heart, ocular, or cells of the central nervous system) can serve as a depot location for protein production.

[1238] In one embodiment, the compositions of the invention facilitate a subject's endogenous production of one or more functional proteins and/or enzymes. In an embodiment of the present invention, the transfer vehicles comprise circRNA which encode a deficient protein or enzyme. Upon distribution of such compositions to the target tissues and the subsequent transfection of such target cells, the exogenous circRNA loaded into the transfer vehicle (e.g., a lipid nanoparticle) may be translated in vivo to produce a functional protein or enzyme encoded by the exogenously administered circRNA (e.g., a protein or enzyme in which the subject is deficient). Accordingly, the compositions of the present invention exploit a subject's ability to translate exogenously- or recombinantly-prepared circRNA to produce an endogenously-translated protein or enzyme, and thereby produce (and where applicable excrete) a functional protein or enzyme. The expressed or translated proteins or enzymes may also be characterized by the in vivo inclusion of native post-translational modifications which may often be absent in recombinantly-prepared proteins or enzymes, thereby further reducing the immunogenicity of the translated protein or enzyme.

[1239] The administration of circRNA encoding a deficient protein or enzyme avoids the need to deliver the nucleic acids to specific organelles within a target cell. Rather, upon transfection of a target cell and delivery of the nucleic acids to the cytoplasm of the target cell, the circRNA contents of a transfer vehicle may be translated and a functional protein or enzyme expressed.

[1240] In some embodiments, a circular RNA comprises one or more miRNA binding sites. In some embodiments, a circular RNA comprises one or more miRNA binding sites recognized by miRNA present in one or more non-target cells or non-target cell types (e.g., Kupffer cells or hepatic cells) and not present in one or more target cells or target cell types (e.g., hepatocytes or T cells). In some embodiments, a circular RNA comprises one or more miRNA binding sites recognized by miRNA present in an increased concentration in one or more non-target cells or non-target cell types (e.g., Kupffer cells or hepatic cells) compared to one or more target cells or target cell types (e.g., hepatocytes or T cells). miRNAs are thought to function by pairing with complementary sequences within RNA molecules, resulting in gene silencing.

### 13. Pharmaceutical Compositions

[1241] In certain embodiments, provided herein are compositions (e.g., pharmaceutical compositions) comprising a therapeutic agent provided herein. In some embodiments, the therapeutic agent is a circular RNA polynucleotide provided herein. In some embodiments the therapeutic agent is a vector provided herein. In some embodiments, the therapeutic agent is a cell comprising a circular RNA or vector provided herein (e.g., a human cell, such as a human T cell). In certain embodiments, the composition further comprises a pharmaceutically acceptable carrier. In some embodiments, the compositions provided herein comprise a therapeutic agent provided herein in combination with other pharmaceutically active agents or drugs, such as anti-inflammatory drugs or antibodies capable of targeting B cell antigens, e.g., anti-CD20 antibodies, e.g., rituximab.

[1242] With respect to pharmaceutical compositions, the pharmaceutically acceptable carrier can be any of those conventionally used and is limited only by chemico-physical considerations, such as solubility and lack of reactivity with the active agent(s), and by the route of administration. The pharmaceutically acceptable carriers described herein, for example, vehicles, adjuvants, excipients, and diluents, are well-known to those skilled in the art and are readily available to the public. It is preferred that the pharmaceutically acceptable carrier be one which is chemically inert to the therapeutic agent(s) and one which has no detrimental side effects or toxicity under the conditions of use.

[1243] The choice of carrier will be determined in part by the particular therapeutic agent, as well as by the particular method used to administer the therapeutic agent. Accordingly, there are a variety of suitable formulations of the pharmaceutical compositions provided herein.

[1244] In certain embodiments, the pharmaceutical composition comprises a preservative. In certain embodiments, suitable preservatives may include, for example, methylparaben, propylparaben, sodium benzoate, and benzalkonium chloride. Optionally, a mixture of two or more preservatives may be used. The preservative or mixtures thereof are typically present in an amount of about 0.0001% to about 2% by weight of the total composition.

[1245] In some embodiments, the pharmaceutical composition comprises a buffering agent. In some embodiments, suitable buffering agents may include, for example, citric acid, sodium citrate, phosphoric acid, potassium phosphate, and various other acids and salts. A mixture of two or more buffering agents optionally may be used. The buffering agent or mixtures thereof are typically present in an amount of about 0.001% to about 4% by weight of the total composition.

[1246] In some embodiments, the concentration of therapeutic agent in the pharmaceutical composition can vary, e.g., less than about 1%, or at least about 1%, 2%, 3%, 4%, 5%, 6%, 7%, 8%, 9% 10%, 15%, 20%, 25%, 30%, 35%, 40%, 45%, or about 50% or more by weight, and can be selected primarily by fluid volumes, and viscosities, in accordance with the particular mode of administration selected.

[1247] The following formulations for oral, aerosol, parenteral (e.g., subcutaneous, intravenous, intraarterial, intramuscular, intradermal, intraperitoneal, and intrathecal), and topical administration are merely exemplary and are in no way limiting. More than one route can be used to administer the therapeutic agents provided herein, and in certain instances, a particular route can provide a more immediate and more effective response than another route.

[1248] Formulations suitable for oral administration can comprise or consist of (a) liquid solutions, such as an effective amount of the therapeutic agent dissolved in diluents, such as water, saline, or orange juice; (b) capsules, sachets, tablets, lozenges, and troches, each containing a predetermined amount of the active ingredient, as solids or granules; (c) powders; (d) suspensions in an appropriate liquid; and (e) suitable emulsions. Liquid formulations may include diluents, such as water and alcohols, for example, ethanol, benzyl alcohol and the polyethylene alcohols, either with or without the addition of a pharmaceutically acceptable surfactant. Capsule forms can be of the ordinary hard or soft shelled gelatin type containing, for example, surfactants, lubricants, and inert fillers, such as lactose, sucrose, calcium phosphate, and corn starch. Tablet forms can include one or more of lactose, sucrose, mannitol, corn starch, potato starch, alginic acid, microcrystalline cellulose, acacia, gelatin, guar gum, colloidal silicon dioxide, croscarmellose sodium, talc, magnesium stearate, calcium stearate, zinc stearate, stearic acid, and other excipients, colorants, diluents, buffering agents, disintegrating agents, moistening agents, preservatives, flavoring agents, and other pharmacologically compatible excipients. Lozenge forms can comprise the therapeutic agent with a flavorant, usually sucrose, acacia or tragacanth. Pastilles can comprise the therapeutic agent with an inert base, such as gelatin and glycerin, or sucrose and acacia, emulsions, gels, and the like containing, in addition to, such excipients as are known in the art.

[1249] Formulations suitable for parenteral administration include aqueous and nonaqueous isotonic sterile injection solutions, which can contain antioxidants, buffers, bacteriostats, and solutes that render the formulation isotonic with the blood of the intended recipient, and aqueous and nonaqueous sterile suspensions that can include suspending agents, solubilizers, thickening agents, stabilizers, and preservatives. In some embodiments, the therapeutic agents provided herein can be administered in a physiologically acceptable diluent in a pharmaceutical carrier, such as a sterile liquid or mixture of liquids, including water, saline, aqueous dextrose and related sugar solutions, an alcohol such as ethanol or hexadecyl alcohol, a glycol such as propylene glycol or polyethylene glycol, dimethylsulfoxide, glycerol, ketals such as 2,2-dimethyl-1,3-dioxolane-4-methanol, ethers, poly(ethyleneglycol) 400, oils, fatty acids, fatty acid esters or glycerides, or acetylated fatty acid glycerides with or without the addition of a pharmaceutically acceptable surfactant such as a soap or a detergent, suspending agent such as pectin, carbomers, methylcellulose, hydroxypropylmethylcellulose, or carboxymethylcellulose, or emulsifying agents and other pharmaceutical adjuvants.

[1250] Oils, which can be used in parenteral formulations in some embodiments, include petroleum, animal oils, vegetable oils, or synthetic oils. Specific examples of oils include peanut, soybean, sesame, cottonseed, corn, olive, petrolatum, and mineral oil. Suitable fatty acids for use in parenteral formulations include oleic acid, stearic acid, and isostearic acid. Ethyl oleate and isopropyl myristate are examples of suitable fatty acid esters.

[1251] Suitable soaps for use in certain embodiments of parenteral formulations include fatty alkali metal, ammonium, and triethanolamme salts, and suitable detergents include (a) cationic detergents such as, for example, dimethyl dialkyl ammonium halides. and alkyl pyridinium halides, (b) anionic detergents such as, for example, alkyl, aryl, and olefin sulfonates, alky, olefin, ether, and monoglyceride sulfates, and sulfosuccinates, (c) nonionic detergents such as, for example, fatty amine oxides, fatty acid alkanolamides, and polyoxyethylenepolypropylene copolymers, (d) amphoteric detergents such as, for example, alkyl-β-aminopropionates, and 2-alkyl-imidazoline quaternary ammonium salts, and (e) mixtures thereof.

[1252] In some embodiments, the parenteral formulations will contain, for example, from about 0.5% to about 25% by weight of the therapeutic agent in solution. Preservatives and buffers may be used. In order to minimize or eliminate irritation at the site of injection, such compositions may contain one or more nonionic surfactants having, for example, a hydrophile-lipophile balance (HLB) of from about 12 to about 17. The quantity of surfactant in such formulations will typically range, for example, from about 5% to about 15% by weight. Suitable surfactants include polyethylene glycol sorbitan fatty acid esters, such as sorbitan monooleate and high molecular weight adducts of ethylene oxide with a hydrophobic base, formed by the condensation of propylene oxide with propylene glycol. The parenteral formulations can be presented in unit-dose or multi-dose sealed containers, such as ampoules or vials, and can be stored in a freeze-dried (lyophilized) condition requiring only the addition of a sterile liquid excipient, for example, water, for injections, immediately prior to use. Extemporaneous injection solutions and suspensions can be prepared from sterile powders, granules, and tablets of the kind previously described.

[1253] In certain embodiments, injectable formulations are provided herein. The requirements for effective pharmaceutical carriers for injectable compositions are well-known to those of ordinary skill in the art (see, e.g., Pharmaceutics and Pharmacy Practice, J.B. Lippincott Company, Philadelphia, Pa., Banker and Chalmers, eds., pages 238-250 (1982), and ASHP Handbook on Injectable Drugs, Toissel, 4th ed, pages 622-630 (1986)).

[1254] In some embodiments, topical formulations are provided herein. Topical formulations, including those that are useful for transdermal drug release, are suitable in the context of certain embodiments provided herein for application to skin. In some embodiments, the therapeutic agent alone or in combination with other suitable components, can be made into aerosol formulations to be administered via inhalation. These aerosol formulations can be placed into pressurized acceptable propellants, such as dichlorodifluoromethane, propane, nitrogen, and the like. They also may be formulated as pharmaceuticals for non-pressured preparations, such as in a nebulizer or an atomizer. Such spray formulations also may be used to spray mucosa.

[1255] In certain embodiments, the therapeutic agents provided herein can be formulated as inclusion complexes, such as cyclodextrin inclusion complexes, or liposomes. Liposomes can serve to target the therapeutic agents to a particular tissue. Liposomes also can be used to increase the half-life of the therapeutic agents. Many methods are available for preparing liposomes, as described in, for example, Szoka et al., Ann. Rev. Biophys. Bioeng., 9, 467 (1980) and U.S. Pat. Nos. 4,235,871, 4,501,728, 4,837,028, and 5,019,369.

[1256] In some embodiments, the therapeutic agents provided herein are formulated in time-released, delayed release, or sustained release delivery systems such that the delivery of the composition occurs prior to, and with sufficient time to cause, sensitization of the site to be treated. Such systems can avoid repeated administrations of the therapeutic agent, thereby increasing convenience to the subject and the physician, and may be particularly suitable for certain composition embodiments provided herein. In one embodiment, the compositions of the invention are formulated such that they are suitable for extended-release of the circRNA contained therein. Such extended-release compositions may be conveniently administered to a subject at extended dosing intervals. For example, in one embodiment, the compositions of the present invention are administered to a subject twice day, daily or every other day. In an embodiment, the compositions of the present invention are administered to a subject twice a week, once a week, every ten days, every two weeks, every three weeks, every four weeks, once a month, every six weeks, every eight weeks, every three months, every four months, every six months, every eight months, every nine months or annually.

[1257] In some embodiments, a protein encoded by an inventive polynucleotide is produced by a target cell for sustained amounts of time. For example, the protein may be produced for more than one hour, more than four, more than six, more than 12, more than 24, more than 48 hours, or more than 72 hours after administration. In some embodiments the polypeptide is expressed at a peak level about six hours after administration. In some embodiments the expression of the polypeptide is sustained at least at a therapeutic level. In some embodiments the polypeptide is expressed at least at a therapeutic level for more than one, more than four, more than six, more than 12, more than 24, more than 48, or more than 72 hours after administration. In some embodiments, the polypeptide is detectable at a therapeutic level in patient serum or tissue (e.g., liver or lung). In some embodiments, the level of detectable polypeptide is from continuous expression from the circRNA composition over periods of time of more than one, more than four, more than six, more than 12, more than 24, more than 48, or more than 72 hours after administration.

[1258] In certain embodiments, a protein encoded by an inventive polynucleotide is produced at levels above normal physiological levels. The level of protein may be increased as compared to a control. In some embodiments, the control is the baseline physiological level of the polypeptide in a normal individual or in a population of normal individuals. In other embodiments, the control is the baseline physiological level of the polypeptide in an individual having a deficiency in the relevant protein or polypeptide or in a population of individuals having a deficiency in the relevant protein or polypeptide. In some embodiments the control can be the normal level of the relevant protein or polypeptide in the individual to whom the composition is administered. In other embodiments the control is the expression level of the polypeptide upon other therapeutic intervention, e.g., upon direct injection of the corresponding polypeptide, at one or more comparable time points.

[1259] In certain embodiments, the levels of a protein encoded by an inventive polynucleotide are detectable at 3 days, 4 days, 5 days, or 1 week or more after administration. Increased levels of secreted protein may be observed in the serum and/or in a tissue (e.g., liver or lung).

[1260] In some embodiments, the method yields a sustained circulation half-life of a protein encoded by an inventive polynucleotide. For example, the protein may be detected for hours or days longer than the half-life observed via subcutaneous injection of the protein or mRNA encoding the protein. In some embodiments, the half-life of the protein is 1 day, 2 days, 3 days, 4 days, 5 days, or 1 week or more.

[1261] Many types of release delivery systems are available and known to those of ordinary skill in the art. They include polymer based systems such as poly(lactide-glycolide), copolyoxalates, polycaprolactones, polyesteramides, polyorthoesters, polyhydroxybutyric acid, and polyanhydrides. Microcapsules of the foregoing polymers containing drugs are described in, for example, U.S. Pat. No. 5,075,109. Delivery systems also include non-polymer systems that are lipids including sterols such as cholesterol, cholesterol esters, and fatty acids or neutral fats such as mono-di- and tri-glycerides; hydrogel release systems; sylastic systems; peptide based systems: wax coatings; compressed tablets using conventional binders and excipients; partially fused implants; and the like. Specific examples include, but are not limited to: (a) erosional systems in which the active composition is contained in a form within a matrix such as those described in U.S. Pat. Nos. 4,452,775, 4,667,014, 4,748,034, and 5,239,660 and (b) diffusional systems in which an active component permeates at a controlled rate from a polymer such as described in U.S. Pat. Nos. 3,832,253 and 3,854,480. In addition, pump-based hardware delivery systems can be used, some of which are adapted for implantation.

[1262] In some embodiments, the therapeutic agent can be conjugated either directly or indirectly through a linking moiety to a targeting moiety. Methods for conjugating therapeutic agents to targeting moieties is known in the art. See, for instance, Wadwa et al., J, Drug Targeting 3:111 (1995) and U.S. Pat. No. 5,087,616.

[1263] In some embodiments, the therapeutic agents provided herein are formulated into a depot form, such that the manner in which the therapeutic agent is released into the body to which it is administered is controlled with respect to time and location within the body (see, for example, U.S. Pat. No. 4,450,150). Depot forms of therapeutic agents can be, for example, an implantable composition comprising the therapeutic agents and a porous or non-porous material, such as a polymer, wherein the therapeutic agents are encapsulated by or diffused throughout the material and/or degradation of the non-porous material. The depot is then implanted into the desired location within the body and the therapeutic agents are released from the implant at a predetermined rate.

### 14. Therapeutic Methods

[1264] In certain aspects, provided herein is a method of treating and/or preventing a condition, e.g., cancer.

[1265] In certain embodiments, the therapeutic agents provided herein are coadministered with one or more additional therapeutic agents (e.g., in the same pharmaceutical composition or in separate pharmaceutical compositions). In some embodiments, the therapeutic agent provided herein can be administered first and the one or more additional therapeutic agents can be administered second, or vice versa. Alternatively, the therapeutic agent provided herein and the one or more additional therapeutic agents can be administered simultaneously.

[1266] In some embodiments, the subject is a mammal. In some embodiments, the mammal referred to herein can be any mammal, including, but not limited to, mammals of the order Rodentia, such as mice and hamsters, or mammals of the order Logomorpha, such as rabbits. The mammals may be from the order Carnivora, including Felines (cats) and Canines (dogs). The mammals may be from the order Artiodactyla, including Bovines (cows) and Swines (pigs), or of the order Perssodactyla, including Equines (horses). The mammals may be of the order Primates, Ceboids, or Simoids (monkeys) or of the order Anthropoids (humans and apes). Preferably, the mammal is a human.

### 15. Sequences

TABLE 17
IRES sequences.

| SEQ | | |
|---|---|---|
| ID | | |
| NO | IRES | Sequence |
| 1 | EMCV-A | cccccctctccctccccccctaacgttactggccgaagccgcttggaataaggccggtgtgcgttt |
| | | gtctatatgttattttccaccatattgccgtcttttggcaatgtgagggcccggaaacctggccctgtct |
| | | tcttgacgagcattcctaggggtctttcccctctcgccaaaggaatgcaaggtctgttgaatgtcgtg |
| | | aaggaagcagttcctctggaagcttcttgaagacaaacaacgtctgtagcgaccctttgcaggcag |
| | | cggaaccccccacctggcgacaggtgcctctgcggccaaaagccacgtgtataagatacacctg |
| | | caaaggcggcacaaccccagtgccacgttgtgagttggatagttgtggaaagagtcaaatggctc |
| | | tcctcaagcgtattcaacaaggggctgaaggatgcccagaaggtaccccattgtatgggatctgat |
| | | ctggggcctcggtgcacatgctttacatgtgtttagtcgaggttaaaaaacgtctaggccccccgaa |
| | | ccacggggacgtggttttcctttgaaaaacacgatgataatatggccacaacc |
| 2 | EMCV-B | ctccccctccccccccttactatactggccgaagccacttggaataaggccggtgtgcgtttgtcta |
| | | catgctattttctaccgcattaccgtcttatggtaatgtgagggtccagaacctgaccctgtcttcttga |
| | | cgaacactcctaggggtctttcccctctcgacaaaggagtgtaaggtctgttgaatgtcgtgaagga |
| | | agcagttcctctggaagcttcttaaagacaaacaacgtctgtagcgaccctttgcaggcagcggaa |
| | | ccccccacctggtgacaggtgcctctgcggccaaaagccacgtgtataagatacacctgcaaag |
| | | gcggcacaaccccagtgccacgttgtgagttggatagttgtggaaagagtcaaatggctctcctca |
| | | agcgtattcaacaaggggctgaaggatgcccagaaggtaccccattgtatgggatctgatctggg |
| | | gcctcggtgcacgtgctttacacgtgttgagtcgaggtgaaaaaacgtctaggccccccgaacca |
| | | cggggacgtggttttcctttgaaaaccacgattacaat |
| 3 | EMCV-Bf | ttgccagtctgctcgatatcgcaggctgggtccgtgactacccactccccctttcaacgtgaaggct |
| | | acgatagtgccagggcgggtactgccgtaagtgccaccccaaacaacaacaacaaaacaaactc |
| | | cccctccccccccttactatactggccgaagccacttggaataaggccggtgtgcgtttgtctacat |
| | | gctattttctaccgcattaccgtcttatggtaatgtgagggtccagaacctgaccctgtcttcttgacg |
| | | aacactcctaggggtctttcccctctcgacaaaggagtgtaaggtctgttgaatgtcgtgaaggaag |
| | | cagttcctctggaagcttcttaaagacaaacaacgtctgtagcgaccctttgcaggcagcggaacc |
| | | ccccacctggtgacaggtgcctctgcggccaaaagccacgtgtataagatacacctgcaaaggc |
| | | ggcacaaccccagtgccacgttgtgagttggatagttgtggaaagagtcaaatggctctcctcaag |
| | | cgtattcaacaaggggctgaaggatgcccagaaggtaccccattgtatgggatctgatctggggc |
| | | ctcggtgcacgtgctttacacgtgttgagtcgaggtgaaaaaacgtctaggccccccgaaccacg |
| | | gggacgtggttttcctttgaaaaccacgattacaat |
| 4 | EMCV-Cf | ttgccagtctgctcgatatcgcaggctgggtccgtgactacccactccccctttcaacgtgaaggct |
| | | acgatagtgccagggcgggtactgccgtaagtgccaccccaaaacaacaacaaccccccctctc |
| | | cctccTccccccctaacgttactggccgaagccgcttggaataaggccggtgtgcgtttgtctatat |
| | | gttattttccaccatattgccgtcttttggcaatgtgagggcccggaaacctggccctgtcttcttgac |
| | | gagcattcctaggggtctttcccctctcgccaaaggaatgcaaggtctgagaatgtcgtgaaggaa |
| | | gcagttcctctggaagcttcttgaagacaaacaacgtctgtagcgaccctttgcaggcagcggaac |
| | | cccccacctggcgacaggtgcctctgcggccaaaagccacgtgtataagatacacctgcaaagg |
| | | cggcacaaccccagtgccacgttgtgagttggatagttgtggaaagagtcaaatggctctcctcaa |
| | | gcgtattcaacaaggggctgaaggatgcccagaaggtaccccattgtatgggatctgatctgggg |
| | | cctcggtgcacatgctttacatgtgtttagtcgaggttaaaaaacgtctaggccccccgaaccacgg |
| | | ggacgtggttttcctttgaaaaacacgatgataat |
| 5 | EMCV pEC9 | ccccccccctaacgttactggccgaagccgcttggaataaggccggtgtgcgtttgtctatatgttat |
| | | tttccaccatattgccgtcttttggcaatgtgagggcccggaaacctggccctgtcttcttgacgagc |
| | | attcctaggggtctttcccctctcgccaaaggaatgcaaggtctgttgaatgtcgtgaaggaagcag |
| | | ttcctctggaagcttcttgaagacaaacaacgtctgtagcgaccctttgcaggcagcggaaccccc |
| | | cacctggcgacaggtgcctctgcggccaaaagccacgtgtataagatacacctgcaaaggcggc |
| | | acaaccccagtgccacgttgtgagttggatagttgtggaaagagtcaaatggctctcctcaagcgt |
| | | attcaacaaggggctgaaggatgcccagaaggtaccccattgtatgggatctgatctggggcctc |
| | | ggtgcacatgctttacatgtgtttagtcgaggttaaaaaacgtctaggccccccgaaccacgggga |
| | | cgtggttttcctttgaaaaacacgatgataat |
| 6 | Picobir- | gtaaattaaatgctatttacaaaatttaaacagaaaggagagatgttatgaaccggttttacaaggttt |
| | navirus | catacatcgaaaatagcactacctggggcagccgacacactaacatcgtctgtttaaccagaagtg |
| | | ttactgaaaggaggttattta |
| 7 | HCV QC64 | acctgcccctaataggggcgacactccgccatgaatcactcccctgtgaggaactactgtcttcac |
| | | gcagaaagcgtctagccatggcgttagtatgagtgtcgtacagcctccaggcccccccctcccgg |
| | | gagagccatagtggtctgcggaaccggtgagtacaccggaattgccgggaagactgggtcctttc |
| | | ttggataaacccactctatgcccggacatttgggcgtgcccccgcaagactgctagccgagtagc |
| | | gttgggttgcgaaaggccttgtggtactgcctgatagggtgcttgcgagtgccccgggaggtctcg |
| | | tagaccgtgcatc |
| 8 | Human | ctacaagctttgtgtaaacaaacttttgtttggcttttctcaagcttctctcacatcaggccccaaagat |
| | Cosavirus | gtcctgaaggtaccccgtgtatctgaggatgagcaccatcgactacccggacctgcaaaattttgc |
| | E/D | aaacgcatgtggtatcccagccccctcctctcggggagggggctttgctcactcagcacaggatct |
| | | gatcaggagatccacctccggtgctttacaccggggcgtggatttaaaaattgcccaaggcctggc |
| | | gcacaacctaggggactaggttttccttatattttaaagctgtcaat |
| 9 | Human | gtcttaggacgacgcatgtggtatcccagcccccgcctacattggcgggggcttttgaagcacca |
| | Cosavirus | gacactggatctgatcaggaggagggtagctgctttacagcccctcttaaaaattgcccaaggtcc |
| | F | ggccacccaacctaggggactaggttttccttttatttttaaattgtcatt |
| 10 | Human | acatgggggagactgcatgtggcagtcttgaaacgtgtggtttgacgtctaccttatatggcagtgg |
| | Cosavirus | gtggagtactgcaaagatgtcaccgtgattacacggtttttgaaccccacaccggctgtttgacgct |
| | JMY | cgtagggcagcaggtttattttcattaaaattcttactttctagctgcatgagttctattcatgcagacg |
| | | gagtgatactcccgttccttcttggacaggttgcctccacgccctttgtggatcttaaggtgaccaagtc |
| | | actggtgttggaggtgaagatagagagtcctcttgggaatgtcatgtggctgtgccaggggttgta |
| | | gcgatgccattcgtgtgtgcggatttcctctcgtggtgacacgagcctcacaggccaaaagccccg |
| | | tccgaaaggacccgaatggtggagtgaccctgactcccccctgcatagttttgtgattaggaacttg |
| | | aggaatttctgtcataaatctctatcacatcaggccccaaagatgtcctgaaggtaccctgtgtatctg |
| | | aggatgagcaccaccgactacccggacttgcattagcagacacatgtggttgcccagccccacct |
| | | cttcagaggtggggctttgctcactcagcacaggatctgatcaggagccccgctcgtgtgctttaca |
| | | ctcgacgcggggttaaaaattgcccaaggcctggcacaacaacctaggggactaggttttcctattt |
| | | ttgtaaattatgtcaat |
| 11 | Rhino- | gtgacaatcagccagattgttaacggtcaagcacttctgtttccccggtacccttgtatacgcttcacc |
| | virus | cgaggcgaaaagtgaggttatcgttatccgcaaagtgcctacgagaagcctagtagcacttttgaa |
| | NAT001 | gcctatggctggtcgctcaactgtttacccagcagtagacctggcagatgaggctagatgttcccc |
| | | accagcgatggtgatctagcctgcgtggctgcctgcacactctattgagtgtgaagccagaaagtg |
| | | gacaaggtgtgaagagcctattgtgctcactttgagtcctccggcccctgaatgtggctaatcctaa |
| | | ccccgtagctgttgcatgtaatccaacatgtctgcagtcgtaatgggcaactatgggatggaaccaa |
| | | ctactttgggtgtccgtgtttcttgtttttctttatgcttgcttatggtgacaactgtagttattacatt |
| | | tgttacc |
| 12 | HRV14 | ttaaaacagcggatgggtatcccaccattcgacccattgggtgtagtactctggtactatgtacctttg |
| | | tacgcctgtttctccccaaccacccttccttaaaattcccacccatgaaacgttagaagcttgacatta |
| | | aagtacaataggtggcgccatatccaatggtgtctatgtacaagcacttctgtttcccaggagcgag |
| | | gtataggctgtacccactgccaaaagcctttaaccgttatccgccaaccaactacgtaacagttagt |
| | | accatcttgttcttgactggacgttcgatcaggtggattttccctccactagtttggtcgatgaggcta |
| | | ggaattccccacgggtgaccgtgtcctagcctgcgtggcggccaacccagcttatgctgggacgc |
| | | ccttttaaggacatggtgtgaagactcgcatgtgcttggttgtgagtcctccggcccctgaatgcgg |
| | | ctaaccttaaccctagagccttatgccacgatccagtggagtaaggtcgtaatgagcaattccggg |
| | | acgggaccgactactttgggtgtccgtgtttctcatttttcttcatattgtcttatggtcacagcatata |
| | | tatacatatactgtgatc |
| 13 | HRV89 | ttaaaactgggagtgggttgttcccactcactccacccatgcggtgttgtactctgttattacggtaac |
| | | tttgtacgccagtttttcccacccttccccataatgtaacttagaagtttgtacaatatgaccaataggt |
| | | gacaatcatccagactgtcaaaggtcaagcacttctgtttccccggtcaatgaggatatgctttaccc |
| | | aaggcaaaaaccttagagatcgttatccccacactgcctacacagagcccagtaccatttttgatat |
| | | aattgggttggtcgctccctgcaaacccagcagtagacctggcagatgaggctggacattcccca |
| | | ctggcgacagtggtccagcctgcgtggctgcctgctcacccttcttgggtgagaagcctaattattg |
| | | acaaggtgtgaagagccgcgtgtgctcagtgtgcttcctccggcccctgaatgtggctaaccttaa |
| | | ccctgcagccgttgcccataatccaatgggtttgcggtcgtaatgcgtaagtgcgggatgggacca |
| | | actactttgggtgtccgtgtttcctgtttttcttttgattgcattttatggtgacaatttatagtgtata |
| | | gattgtcatc |
| 14 | HRVC-02 | ttaaaactgggtacaggttgttcccacctgtatcacccacgtggtgtggtgctcttgtattccggtaca |
| | | cttgcacgccagtttgccacccctcacccgtcgtaacttagaagctaacaactcgaccaacaggcg |
| | | gtggtaaaccataccacttacggtcaagcactcctgtttccccggtatgcgaggaatagactcctac |
| | | agggttgaagcctcaagtatcgttatccgcattggtactacgcaaagcttagtagtgccttgaaagtc |
| | | ccttggttggtcgctccgctagtttcccctagtagacctggcagatgaggcaggacactccccact |
| | | ggcgacagtggtcctgcctgcgtggctgcctgcgcacccttaggggtgcgaagccaagtgacag |
| | | acaaggtgtgaagagccccgtgtgctaccaatgagtcctccggcccctgaatgcggctaatccaa |
| | | ccccacagctattgcacacaagccagtgtgtatgtagtcgtaatgagcaattgtgggacggaaccg |
| | | actactttgggtgtccgtgtttccttttattcttatcattctgcttatggtgacaatactgtgaaatagt |
| | | gttgttacc |
| 15 | HRV-A21 | taaaactggatccaggttgttcccacctggatctcctattgggagttgtactctattattccggtaatttt |
| | | gtacgccagttttatcttccccctccccaattgtaacttagaaggttatcaatacgaccaataggtggt |
| | | agttagccaaactaccaaaggtcaagcacttctgtttccccggtcaaagttgatatgctccaacagg |
| | | gcaaaaacaactgagatcgttatccgcaaagtgcctacgcaaagcctagtaacacctttgaagattt |
| | | atggttggtcgttccgctatttcccatagtagacctggcagatgaggctagaaatcccccactggcg |
| | | acagtgctctagcctgcgtggctgcctgcgcaccccttgggtgcgaagccatacattggacaagg |
| | | tgtgaagagccccgtgtgctcactttgagtcctccggcccctgaatgtggctaaccttaaccctgca |
| | | gctagtgcatgtaatccaacatgttgctagtcgtaatgagtaattgcgggacgggaccaactactttg |
| | | ggtgtccgtgtttcactttttccttttaatattgcttatggtgacaatatatatagctatatatattgac |
| | | acc |
| 16 | Salivirus | ttcccctgcaaccattacgcttactcgcatgtgcattgagtggtgcatgtgttgaacaaacagctaca |
| | A SH1 | ctcacatgggggcgggttttcccgccctacggcttctcgcgaggcccacccctcccctttctcccat |
| | | aactacagtgctttggtaggtaagcatcctgatcccccgcggaagctgctcacgtggcaactgtgg |
| | | ggacccagacaggttatcaaaggcacccggtctttccgccttcaggagtatccctgctagcgaatt |
| | | ctagtagggctctgcttggtgccaacctcccccaaatgcgcgctgcgggagtgctcttccccaact |
| | | caccctagtatcctctcatgtgtgtgcttggtcagcatatctgagacgatgttccgctgtcccagacc |
| | | agtccagtaatggacgggccagtgtgcgtagtcgtcttccggcttgtccggcgcatgtttggtgaac |
| | | cggtggggtaaggttggtgtgcccaacgcccgtactcaggggatacctcaaggcacccaggaat |
| | | gccagggaggtaccccgcttcacagcgggatctgaccctggggtaaatgtctgcgggggggtcttc |
| | | ttggcccacttctcagtacttttcagg |
| 17 | Salivirus | acatggggggtctgcggacggcttcggcccacccgcgacaagaatgccgtcatctgtcctcatta |
| | FHB | cccgtattccttcccttcccccgcaaccaccacgcttactcgcgcacgtgttgagtggcacgtgcgt |
| | | tgtccaaacagctacacccacacccttcggggcgggtttgtcccgccctcgggttcctcgcggaa |
| | | cccccccctccctctctctctttctatccgccctcacttcccataactacagtgctttggtaggtgagc |
| | | accctgaccccccgcggaagctgctaacgtggcaactgtggggatccaggcaggttatcaaagg |
| | | cacccggtctttccgccttcaggagtatctctgccggtgaattccggtagggctctgcttggtgcca |
| | | acctcccccaaatgcgcgctgcgggagtgctcttccccaactcatcttagtaacctctcatgtgtgtg |
| | | cttggtcagcatatctgaggcgacgttccgctgtcccagaccagtccagcaatggacgggccagt |
| | | gtgcgtagtcgctttccggttttccggcgcatgtttggcgaaacgctgaggtaaggttggtgtgccc |
| | | aacgcccgtaatttggtgatacctcaagaccacccaggaatgccagggaggtaccccacttcggt |
| | | gggatctgaccctgggctaattgtctacggtggttcttcttgcttccacttctcttttttctggcatg |
| 18 | Salivirus | tatggcaggcgggcttgtggacggcttcggcccacccacagcaagaatgccatcatctgtcctca |
| | NG-J1 | cccccaattttcccttttcttcccctgcaaccattacgcttactcgcatgtgcattgagtggtgcatgtg |
| | | ttgaacaaacagctacactcacatgggggcgggttttcccgccctacggcctctcgcgaggcccac |
| | | cccttccctccccttataactacagtgctttggtaggtaagcatcctgatcccccgcggaagctgctc |
| | | acgtggcaactgtggggacccagacaggttatcaaaggcacccggtctttccgccttcaggagtat |
| | | ccctactagtgaattctagcggggctctgcttggtgccaacctcccccaaatgcgcgctgcgggag |
| | | tgctcttccccaactcaccctagtatcctctcatgtgtgtgcttggtcagcatatctgagacgatgttcc |
| | | gctgtcccagaccagtccagtaatggacgggccagtgcgtgtagtcgtcttccggcttgtccggg |
| | | gcatgtttggtgaaccggtggggtaaggttggtgtgcccaacgcccgtactttggtgacacctcaa |
| | | gaccacccaggaatgccagggaggtaccccacctcacggtgggatctgaccctgggctaattgt |
| | | ctacggtggttcttcttgcttccacttctttcttctgttcacg |
| 19 | Human | tttgaaaggggtctcctagagagcttggccgtcgggccttataccccgacttgctgagtttctctagg |
| | Parecho- | agagcccttttcccagccctgaggcggctggtcaataaaagcctcaaacgtaactaacacctaaga |
| | virus 1 | agatcatgtaaaccctatgcctggtctccactattcgaaggcaacttgcaataagaagagtgggatc |
| | | aagacgcttaaagcatagagacagttttcttttctaacccacatttgtgtggggtggcagatggcgtg |
| | | ccataactctaatagtgagataccacgcttgtggaccttatgctcacacagccatcctctagtaagttt |
| | | gtgagacgtctggtgacgtgtgggaacttattggaaacaacattttgctgcaaagcatcctactgcc |
| | | agcggaaaaacacctggtaacaggtgcctctggggccaaaagccaaggtttaacagaccctttag |
| | | gattggttctaaacctgagatgttgtggaagatatttagtacctgctgatctggtagttatgcaaacact |
| | | agttgtaaggcccatgaaggatgcccagaaggtacccgtaggtaacaagtgacactatggatctg |
| | | atttggggccagatacctctatcttggtgatctggttaaaaaacatctaatgggccaaacccggggg |
| | | ggatccccggtttcctcttattctatcaatgccact |
| 20 | Crohivirus | gtataagagacaggtgtttgccttgtcttcggactggcatcttgggaccaaccccccttttccccagc |
| | B | catgggttaaatggcaataaaggacgtaacaactttgtaaccattaagctttgtaattttgtaaccact |
| | | aagctttgtgcacataatgtaaccatcaagcttgttagtcccagcaggaggtttgcatgcttgtagcc |
| | | gaaatggggctcgaccccccatagtaggatacttgattttgcattccattgtggacctgcaaactcta |
| | | cacatagaggctttgtcttgcatctaaacacctgagtacagtgtgtacctagaccctatagtacggga |
| | | ggaccgtttgtttcctcaataaccctacataataggctaggtgggcatgcccaatttgcaagatccca |
| | | gactgggggtcggtctgggcagggttagatccctgttagctactgcctgatagggtggtgctcaac |
| | | catgtgtagtttaaattgagctgttcatatacc |
| 21 | Yc-3 | actgaagatcctacagtaactactgccccaatgaacgccacagatgggtctgctgatgactacctat |
| | | cttagtgctagttgaggtttgaagtgagccggtttttagaagaaccagtttctgaacattatcatcccc |
| | | agcatctattctatacgcacaagatagatagtcatcagcagacacatctgtgctactgcttgatagag |
| | | ttgcggctggtcaacttagattggtataaccagttgagtggcaa |
| 22 | Rosavirus | tatgcatcactggacggcctaacctcggtcgtggcttcttgccgatttcagcgctaccaggctttctg |
| | M-7 | gtctcgccaggcgttgattagtaggtgcactgtctaagtgaagacagcagtgctctctgtgaaaagt |
| | | tgatgacactcttcaggtttgtagcgatcactcaaggctagcggatttccccgtgtggtaacacacg |
| | | cctctaggcccagaaggcacggtgttgacagcaccccttgagtggctggtcttccccaccagcac |
| | | ctgatttgtggattcttcctagtaacggacaagcatggctgctcttaagcattcagtgcgtccggggc |
| | | tgaaggatgcccagaaggtacccgcaggtaacgataagctcactgtggatctgatctggggctgc |
| | | gggctgggtgtctttccacccagccaaaacccgtaaaacggtagtcgcagttaaaaaacgtctag |
| | | gccccacccccccagggatggggggttcccttaaaccctcacaagttcaac |
| 23 | Shanbavirus | tgaaaagggggcgcagggtggtggtggttactaaatacccaccatcgccctgcacttcccttttcc |
| | A | cctgtggctcagggtcacttagccccctctttgggttaccagtagttttctacccctgggcacagggt |
| | | taactatgcaagacggaacaacaatctcttagtccccctcgccgatagtgggctcgacccccatgt |
| | | gtaggagtggataagggacggagtgagccgatacggggaagagtgtgcggtcacaccttaattc |
| | | catgagcgctgcgaagaaggaagctgtgaacaatggcgacctgaaccgtacacatggagctcca |
| | | caggcatggtactcgttagactacgcagcctggttgggagtgggtataccctgggtgagccgcca |
| | | gtgaatgggttgttcactggttaacacacactgcctgatagggtcagggcctcctgtccccgccgta |
| | | atgaggtagaccatatgcc |
| 24 | Pasivirus | gcggctggatattctggccgtgcaactgcttttgaccagtggctctgggtaacttagccaaagtgtc |
| | A | cttctccctttccctattatatgttttatggctttgtctggtcttgtttagtttatatataagatccttt |
| | | ccgccgatatagacctcgacagtctagtgtaggaggattggtgatattaatttgccccagaagagtgacc |
| | | gtgacacatagaaaccatgagtacatgtgtatccgtggaggatcgcccgggactggattccatatccc |
| | | attgccatcccaacaagcggagggtatacccactatgtgcacgtctgcagtgggagtctgcagatt |
| | | tagtcatactgcctgatagggtgtgggcctgcactctggggtactcaggctgtttatataat |
| 25 | Pasivirus | gctggactttctggctgcgcaactgcttttaaccagtggctctgggttacttagccaaaaccccctttc |
| | A2 | cccgtaccctagtttgtgtgtgtattattattttgttgttgttttgtaaatttttatataagatcctttc |
| | | cgccgatatagacctcgacagtctagtgtaggaggattggtgatattaatatgccccagaagagtgaccg |
| | | tgacacatagaaaccatgagtacatgtgtatccgtggaggatcgcccgggactggattccatatccca |
| | | ttgccatcccaacaaacggagggtatacccgctatgtgcgcgtctacagtgggaatctgtagattta |
| | | gtcatactgcctgatagggtgtgggcctgcactctggggtactcaggctgtttatataat |
| 26 | Echovirus | ttaaaacagcctgtgggttgttcccatccacagggcccactgggcgccagcactctggtattgcgg |
| | E14 | taccttagtgcgcctgttttatatacccgtcccccaaacgtaacttagacgcatgtcaacgaagacca |
| | | atagtaagcgcagcacaccagctgtgttccggtcaagcacttctgttaccccggaccgagtatcaa |
| | | taagctactcacgtggctgaaggagaaaacgttcgttacccgaccaattacttcaagaaacctagta |
| | | acaccatgaaggttgcgcagtgtttcgctccgcacaaccccagtgtagatcaggtcgatgagtcac |
| | | cgcattccccacgggtgaccgtggcggtggctgcgctggcggcctgcccatggggaaacccat |
| | | gggacgcttcaatactgacatggtgcgaagagtctattgagctaattggtagtcctccggcccctga |
| | | atgcggctaatcctaactgcggagcagatacccacacaccagtgggcagtctgtcgtaacgggca |
| | | actctgcagcggaaccgactactttgggtgtccgtgtttctctttatccttatactggctgcttatggtg |
| | | acaattgagagattgttaccatatagctattggattggccatccggtgacaaatagagcaattgtgtat |
| | | ttgtttgttggtttcgtgccattaaattacaaggttctaaacacccttaatcttattatagcattcaaca |
| | | caacaaa |
| 27 | Human | gtacattagatgcgtcatctgcaactttagtcaataaattacctccaatgtcattaccaacattccctac |
| | Parecho- | cttttcactaacacctaagacaacaagtacctatgcctggtctccactattcgaaggcaacttgcaat |
| | virus 5 | aagaagagtggaattaagacgcttaaagcatagagctagttatcttttctaacccacaaagttttgtg |
| | | gggtggcagatggcgtgccataactctattagtgagataccatgcttgtggatcttatgctcacaca |
| | | gccatcctctagtaagttgataaggtgtctggtgatatgtgggaactcacatgaaccattaatttaccg |
| | | taaggtatcctatagccagcggaatcacatctggtgacagatgcctctggggccgaaagccaagg |
| | | tttaacagaccctataggattggtttcaaaacctgaattgatgtggattgtgtatagtacctgttgatct |
| | | ggtaacagtgtcaacactagttgtaaggcccacgaaggatgcccagaaggtacccgtaggtaaca |
| | | agtgacactatggatctgatctggggccagctacctctatcatggtgagttggttaaaaaacgtctag |
| | | tgggccaaacccaggggggatccctggtttccttttacctaatcaaagccact |
| 28 | Aichi | tttgaaaagggggtgggggggcctcggccccctcaccctcttttccggtggtctggtcccggacc |
| | Virus | accgttactccattcagcttcttcggaacctgttcggaggaattaaacgggcacccatactcccccc |
| | | accccccttttgtaactaagtatgtgtgctcgtgatcttgactcccacggaacggaccgatccgttgg |
| | | tgaacaaacagctaggtccacatcctcccttcccctgggagggcccccgccctcccacatcctcc |
| | | ccccagcctgacgtatcacaggctgtgtgaagcccccgcgaaagctgctcacgtggcaattgtgg |
| | | gtccccccttcatcaagacaccaggtctttcctccttaaggctagccccggcgtgtgaattcacgttg |
| | | ggcaactagtggtgtcactgtgcgctcccaatctcggccgcggagtgctgttccccaagccaaac |
| | | ccctggcccttcactatgtgcctggcaagcatatctgagaaggtgttccgctgtggctgccaacctg |
| | | gtgacaggtgccccagtgtgcgtaaccttcttccgtctccggacggtagtgattggttaagatttggt |
| | | gtaaggttcatgtgccaacgccctgtgcgggatgaaacctctactgccctaggaatgccaggcag |
| | | gtaccccacctccgggtgggatctgagcctgggctaattgtctacgggtagtttcatttccaatccttt |
| | | tatgtcggagtc |
| 29 | Hepatitis | ttcaagaggggtctccggagttttccggaacccctcttggaagtccatggtgaggggacttgatac |
| | A Virus | ctcaccgccgtttgcctaggctataggctaaatttccctttccctgtccttcccctatttccctttgttt |
| | HA16 | tgtttgtaaatattaattcctgcaggttcagggttctttaatctgtttctctataagaacactcaatttt |
| | | tcacgctttctgtctcctttcttccagggctctccccttgccctaggctctggccgttgcgcccggcggg |
| | | gtcaactccatgattagcatggagctgtaggagtctaaattggggacgcagatgtttgggacgtcgcctt |
| | | gcagtgttaacttggctttcatgaacctctttgatcttccacaaggggtaggctacgggtgaaacctctt |
| | | aggctaatacttcaatgaagagatgccttggatagggtaacagcggcggatattggtgagttgttaa |
| | | gacaaaaaccattcaacgccggaggactggctctcatccagtggtgcattgagggattgattgt |
| | | cagggctgtctctaggtttaatctcagacctctctgtgcttagggcaaacactatttggccttaaatgg |
| | | gatcctgtgagagggggtccctccattgacagctggactgttctttggggccttatgtggtgtttgcc |
| | | tctgaggtactcaggggcatttaggtttttcctcattcttaaataata |
| 30 | Phopivirus | gggagtaaacctcaccaccgtttgccgtggtttacggctacctatttttggatgtaaatattaattcctg |
| | | caggttcaggtctcttgaattatgtccacgctagtggcactctcttacccataagtgacgccttagcg |
| | | gaacctttctacacttgatgtggttaggggttacattatttccctgggccttctttggccctttttcccc |
| | | tgcactatcattctttcttccgggctctcagcatgccaatgttccgaccggtgcgcccgccggggttaa |
| | | ctccatggttagcatggagctgtaggccctaaaagtgctgacactggaactggactattgaagcat |
| | | acactgttaactgaaacatgtaactccaatcgatcttctacaaggggtaggctacgggtgaaacccc |
| | | ttaggttaatactcatattgagagatacttctgataggttaaggttgctggataatggtgagtttaacga |
| | | caaaaaccattcaacagctgtgggccaacctcatcaggtagatgcttttggagccaagtgcgtagg |
| | | ggtgtgtgtggaaatgcttcagtggaaggtgccctcccgaaaggtcgtaggggtaatcaggggca |
| | | gttaggtttccacaattacaatttgaa |
| 31 | CVA10 | gctcttccgatctgggttgttcccacccacagggcccactgggcgccagcactctgattccacgga |
| | | atctttgtgcgcctgttttacaacccttcccaatttgtacgtagaagcaatacacactactgatcaata |
| | | gtaggcatggcgcgccagtcatgtcatgatcaagcacttctgttcccccggactgagtatcaataga |
| | | ctgctcacgcggttgaaggagaaaacgttcgttacccggctaactacttcgagaaacctagtagca |
| | | ccatggaagctgcggagtgtttcgctcagcactttccccgtgtagatcaggtcgatgagtcactgca |
| | | atccccacgggcgaccgtggcagtggctgcgttggcggcctgcctatggggcaacccataggac |
| | | gctaatcctaactgcggagcacatgccttcaacccaggaggtggtgtgtcgtaacgggtaactctg |
| | | gctaatcctaactgcggagcacatgccttcaacccaggaggtggtgtgtcgtaacgggtaactctg |
| | | cagcggaaccgactactttgggtgtccgtgtttccttttatccttatattggctgcttatggtgacaatc |
| | | acggaattgttgccatatagctattggattggccatccggtgtctaacagagctattgtatacctatttg |
| | | ttggatttactcccctatcatacaaatctctgaacactttgtgctttatactgaacttaaacacacgaaa |
| 32 | Entero- | ttaaaacagctctggggttgttcccaccccagaggcccacgtggcggccagtacaccggtaccac |
| | virus C | ggtacccttgtacgcctgttttatactccccctccccgtaaactagaagcacgaaacacaagttcaata |
| | | gaagggggtacagaccagtaccaccacgaacaagcacttctgttcccccggtgaggtcacatag |
| | | actgtccccacggtcaaaagtgactgatccgttatccgctcacgtacttcggaaagcctagtaccac |
| | | cttggaatctacgatgcgttgcgctcagcactcgaccccggagtgtagcttaggctgatgagtctg |
| | | gacgttccccactggtgacagtggtccaggctgcgttggcggcctacctgtggtccaaaaccaca |
| | | ggacgctagtagtgaacaaggtgtgaagagcccactgagctacctgagaatcctccggcccctg |
| | | aatgcggctaatcccaaccacggagcaggtaatcgcaaaccagcggtcagcctgtcgtaacgcg |
| | | taagtctgtggcggaaccgactactttgggtgtccgtgtttccttttatttttatggtggctgcttatgg |
| | | tgacaatcatagattgttatcataaagcaaattggattggccatccggagtgagctaaactatctatttc |
| | | tctgagtgttggattcgtttcacccacattctgaacaatcagcctcattagtgttaccctgttaataaga |
| | | cgatatcatcacg |
| 33 | Entero- | ttaaaacagctctggggttgttcccaccccagaggcccacgtggcggctagtactccggtacccc |
| | virus D | ggtacccttgtacgcctgttttatactccctttcccaagtaactttagaagaaataaactaatgttcaac |
| | | aggagggggtacaaaccagtaccaccacgaacacacacttctgtttccccggtgaagttgcatag |
| | | actgtacccacggttgaaagcgatgaatccgttacccgcttaggtacttcgagaagcctagtatcat |
| | | cttggaatcttcgatgcgttgcgatcagcactctaccccgagtgtagcttgggtcgtgagtctgga |
| | | caccccacaccggcgacgtggtccaggctgcgttggcggcctaccctggctagcaccatggga |
| | | cgctagttgtgaacaaggtgcgaagagcctattgagctacctgagagtcctccggcccctgaatgc |
| | | ggctaatcccaaccacggagcaaatgctcacaatccagtgagtggtttgtcgtaatgcgcaagtct |
| | | gtggcggaaccgactactttgggtgtccgtgtttccttttatttttattatggctgcttatggtgacaat |
| | | ctgagattgttatcatatagctattggattagccatccggtgatatcttgaaattttgccataacttttt |
| | | cacaaatcctacaacattacactacactttctcttgaataattgagacaactcata |
| 34 | Entero- | ttaaaatagcctcagggttgttcccaccctgagggcccacgtggtgtagtactctggtattacggtac |
| | virus J | ctttgtacgcctattttatacccccttccccaagtaatttagaagcaagcacaaaccagttcagtagta |
| | | agcagtacaatccagtactgtaatgaacaagtacttctgttaccccggaagggtctatcggtaagct |
| | | gtacccacggctgaagaatgacctaccgttaaccggctacctacttcgagaagcctagtaatgccg |
| | | ttgaagttttattgacgttacgctcagcacactaccccgtgtgtagttttggctgatgagtcacggcac |
| | | tccccacgggcgaccgtggccgtggctgcgttggcggccaaccaaggagtgcaagctccttgga |
| | | cgtcatattacagacatggtgtgaagagcctattgagctaggtggtagtcctccggcccctgaatgc |
| | | ggctaatcctaactccggagcatatcggtgcgaaccagcacttggtgtgttgtaatacgtaagtctg |
| | | gagcggaaccgactactttgggtgtccgtgtttcctgttttaacttttatggctgcttatggtgacaatt |
| | | taacattgttaccatatagctgagggttggccatccggattttgttataaaaccatttcctcgtgccttg |
| | | acctttaacacatttgtgaacttctttaaatcccttttattagtccttaaatactaaga |
| 35 | Human | aactgttgttgtagcaatgcgcatattgctacttcggtacgcctaattggtaggcgcccggccgacc |
| | Pegivirus | ggccccgcaagggcctagtaggacgtgtgacaatgccatgagggatcatgacactggggtgag |
| | 2 | cggaggcagcaccgaagtcgggtgaactcgactcccagtgcgaccacctggcttggtcgttcatg |
| | | gagggcatgcccacgggaacgctgatcgtgcaaagggatgggtccctgcactggtgccatgcg |
| | | cggcaccactccgtacagcctgatagggtggcggcgggcccccccagtgtgacgtccgtggag |
| | | cgcaac |
| 36 | GBV-C | tgacgtgggggggttgatTTTccccccccggcactgggtgcaagccccagaaaccgacgcct |
| | GT110 | atctaagtagacgcaatgactcggcgccgactcggcgaccggccaaaaggtggtggatgggtga |
| | | tgacagggttggtaggtcgtaaatcccggtcatcctggtagccactataggtgggtcttaagagaa |
| | | ggtcaagattcctcttacgcctgcggcgagaccgcgcacggtccacaggtgttggccctaccggt |
| | | gtgaataagggcccgacatcaggc |
| 37 | GBV-C | gacgtgggggggttgatccccccccTTTggcactgggtgcaagccccagaaaccgacgccta |
| | K1737 | tttaaacagacgttaagaaccggcgccgacccggcgaccggccaaaaggtggtggatgggtgat |
| | | gccagggttggtaggtcgtaaatcccggtcatcttggtagccactataggtgggtcttaagggttgg |
| | | ttaaggtccctctggcgcttgtggcgagaaagcgcacggtccacaggtgttgccctaccggtgt |
| | | gaataagggcccgacgtcaggctcgtcgttaaaccgagcccactacccacctgggcaaacaacg |
| | | cccacgtacggtccacgtcgcccttcaatgtctctcttgaccaataggcttagccggcgagttgaca |
| | | aggaccagtgggggctgggcggtaggggaaggacccctgccgctgcccttcccggtggagtg |
| | | ggaaatgc |
| 38 | GBV-C | tgacgtgggggggttgatccGccccccccggcactCggtgcaagccccataaaccgacgccta |
| | Iowa | tctaagtagacgcaatgactcggcgccgactcggcgaccggccaaaaggtggtggatgggtggt |
| | | gacagggttggtaggtcgtaaatcccggtcatcctggtagccactataggtgggtcttaagagaag |
| | | gtcaagactcctcttgtgcctgcggcgagaccgcgcacggtccacaggtgctggccctaccggtg |
| | | tgaataagggcccgacgtcaggctcgtcgttaaaccgagcccgtcacccacctgggcaaacgac |
| | | gcccacgtacggtccacgtcgcccttca |
| 39 | Pegivirus | tgtagcaatgcgcatattgctacttcggtacgcctaattggtaggcgcccggccgaccggccccgc |
| | A 1220 | aagggcctagtaggacgtgtgacaatgccatgcgggatcatgacactggggtgagcggaggca |
| | | gcaccgaagtcgggtgaactcgactcccagtgcgaccacctggcaggtcgttcatggagggcat |
| | | gcccacgggaacgctgatcgtgcaaagggatgggtccctgcactggtgccatgcgcggcacca |
| | | ctccgtacagcctgatagggtggcggcgggcccccccagtgtgacgtccgtggagcgcaac |
| 40 | Pasivirus | attttctggccgtgtagctgcttttgaccagtggctctgggttacttagccaaatcccccttccttcacc |
| | A3 | cttttaaatttgatggtctgtgttgtttgttttgtcttgtctaaataatatataagatccttcccgccga |
| | | tacagacctcgacagtctggtgtaggagggttggtgttattaatttgccccagaagagtgaccgtgacac |
| | | atagaaaccatgagtacatgtgtatccgtggaggatcgcccgggactggattccatatcccattgcc |
| | | atcccaacaagcggagggtatacccactatgtgcgcgtttgcagtgggaatctgcaaatttagtcat |
| | | actgcctgatagggtgtgggcctgcactctggggtactcaggctgacatataat |
| 41 | Sapelovirus | cccctccacccttaaggtggttgtatcccacataccccaccctcccttccaaagtggacggacaact |
| | | ggattttgactaacggcaagtctgaatggtatgatttggatacgtttaaacggcagtagcgtggcga |
| | | gctatggaaaaatcgcaattgtcgatagccatgttagtgacgcgcttcggcgtgctcctttggtgatt |
| | | cggcgactggttacaggagagtaggcagtgagctatgggcaaacctctacagtattacttagagg |
| | | gaatgtgcaattgagacttgacgagcgtctctttgagatgtggcgcatgctcttggcattaccatagt |
| | | gagcttccaggagggaaacctggactgggcctatactacctgatagggtcgcggctggccgcct |
| | | gtaactagtatagtcagttgaaaccccccc |
| 42 | Rosavirus | gtctctttagtgtctatgcttcagagagcggtgaactgacaccgttgcttcttgcacagcccttcgtgc |
| | B | cggtctttccggttctcgacagcgttgggcatcatggctagttaggctaagatagtggatgatctagt |
| | | gaacagttttggattgtttggagttttgtagcgatgctagtagtgtgtgtggacctccccacgtggtaa |
| | | cacgtgccccacaggccaaaagccaaggtgttgaaagcacccctactagtcccagactcacccat |
| | | ctgggaactcctctcatgaaaaatcttagtaacttttgattcggctattcatcaacctctctagtcaagg |
| | | gctgaaggatgcccggaaggtacccgcaggtaacgataagctcactgtggatctgatccggggc |
| | | tttggtgcgaccgtctgtccggcgtagccagagttaaaaaacgtctaggcccttccaccccaaggg |
| | | attggggtttccccaatcatttgaaagttcact |
| 43 | Bakunsa | ttttgaacgccacctcggagcgatatccggggaccccctcccctttttccttcctaccttcttcccaaa |
| | Virus | tttccctcttcccttgttattttggtttggatttcctggacatgactcggacggatctatctcatttgct |
| | | ttgtgtctgctccaccagtggcatggtcgaaagatcatcaacactggacgtgtactgtaatggccaaacg |
| | | tgcccacaggggaaaccatgccggtcgctgtagcggcgggtggacgtggtggacccctctccct |
| | | gctcataaactttgggtaggtgaagggttcaagcgacgcttgccgtgagggcgcatccggatggt |
| | | gggaaccaacaaactaggctgtaatggccgacctcaggtggatgagctagggctgctgcaccaa |
| | | aagggactcgattcgatatcccggcctggtagcctagtgcagtggactcgtagttgggaatctacg |
| | | actggcctagtacagggtgatagccccgtttcccacgcccacctgttgtagggacacccccccc |
| 44 | Tremovirus | tttgaaagaggcctccggagtgtccggaggctctctttcgacccaacccatactggggggtgtgtg |
| | A | ggaccgtacctggagtgcacggtatatatgcattcccgcatggcaagggcgtgctaccttgcccct |
| | | tgacgcatggtatgcgtcatcatttgccttggttaagccccatagaaacgaggcgtcacgtgccga |
| | | aaatccctttgcgtttcacagaaccatcctaaccatgggtgtagtatgggaatcgtgtatggggatga |
| | | ttaggatctctcgtagagggataggtgtgccattcaaatccagggagtactctggctctgacattgg |
| | | gacatttgatgtaaccggacctggttcagtatccgggttgtcctgtattgttacggtgtatccgtcttgg |
| | | cacactgaaagggtatttttgggtaatcctttcctactgcctgatagggtggcgtgcccggccacga |
| | | gagattaagggtagcaatttaaac |
| 45 | Swine | gcttttgaccagtggctctgggttacttagccaagtccctttctcttattttcactagtttatgttgtgt |
| | Pasivirus | gttgtctgttttgttttgtttaaattgtatacaagatccttcccgccgacacagacctcgacagtctggt |
| | 1 | gtaggagggttggtgatattaatttgccccaaaagagtgaccgtgatacgtggaaaccatgagtacatgt |
| | | gtatccgtggaggatcgcccgggactggattccatatcccattgccatcccaacaaacggagggt |
| | | atacccaccacgtgcgcgtttgcagtgggaatctgcaaatttagtcatactgcctgatagggtgtgg |
| | | gcctgcactttggggtactcaggctgttcatataat |
| 46 | PLV-CHN | acatggggtatgttgtctgtcctgttttgagaaacaatatataagatcctttccgccgatatagacctc |
| | | gacagtctagtgtaggaggattggtgatagtaacttgccccagaagagtgaccgtgacacataga |
| | | aaccatgagtacatgtgtatccgtggaggatcgcccgggactggattccatatcccattgccatccc |
| | | aacaaacggagggtatacccactatgtgcgcgtttgcagtgggagcctgcaaatttagtcatactg |
| | | cctgatagggtgtgggcctgcactctggggtactcaggctgtttatataat |
| 47 | Pasivirus | tgaaaaagtggttgtgcagctggattttccggctgtgcaactgcttttgaccagtggctctgggttact |
| | A | tagccaaattcctttcccttatccctattggtttgtgttgtgtgttgtttgttttgttttgtcttaacta |
| | (longer) | tatacaagatccttcccgccgatacagacctcgacagtctggtgtaggagggttggtgttattaatttgc |
| | | cccaaaagagtgaccgtgacacgtggaaaccatgagtacatgtgtatccgtggaggatcgcccgggact |
| | | ggattccatatcccattgccatcccaacaaacggagggtatacccaccacgtgcgcgtttgcagtg |
| | | ggaatctgcaaatttagtcatactgcctgatagggtgtgggcctgcactttggggtactcaggctgtt |
| | | tatataat |
| 48 | Sicinivirus | gtgtcattaaggtgtgtttggaagttcgaattagctggtttgtggtgattagtagaccccctggaggta |
| | | cccaattcggatctgaccagggacccgtgactataccgctccggtaattcgggtttaaaacaatga |
| | | acgtcaccacacaattacttttctcattttattttcatcattgtcttcctatttaccgattacactcgat |
| | | ttccttggatgttcctggagatttccctggttacctggaccctcattattgttgttgatcacccagcgag |
| | | ctgtcccaattgcttattatttgcgcttacaacacgtcctaatatttttctggagatcgggagattgagc |
| | | tcccgggctatcctgccattcaac |
| 49 | Hepacivirus | gggaacaatggtccgtccgcggaacgactctagccatgagtctagtacgagtgcgtgccacccat |
| | K | tagcacaaaaaccactgactgagccacacccctcccggaatcctgagtacaggacattcgctcgg |
| | | acgacgcatgagcctccatgccgagaaaattgggtatacccacgggtaaggggtggccacccag |
| | | cgggaatctgggggctggtcactgactatggtacagcctgatagggtgctgccgcagcgtcagtg |
| | | gtatgcggctgttcatggaac |
| 50 | Hepacivirus | acctccgtgctaggcacggtgcgttgtcagcgttttgcgcttgcatgcgctacacgcgtcgtccaac |
| | A | gcggagggaacttcacatcaccatgtgtcactccccctatggagggttccaccccgcttacacgga |
| | | aatgggttaaccatacccaaagtacgggtatgcgggtcctcctagggcccccccggcaggtcga |
| | | gggagctggaattcgtgaattcgtgagtacacgaaaatcgcggcttgaacgtctttgaccttcgga |
| | | gccgaaatttgggcgtgccccacgaaggaaggcgggggcggtgttgggccgccgccccccttat |
| | | cccacggtctgataggatgcttgcgagggcacctgccggtctcgtagaccataggac |
| 51 | BVDV1 | gtatacgagaatttgcctaggacctcgtttacaatatgggcaatctaaaattataattaggcctaagg |
| | | gacaaatcctcctcagcgaaggccgaaaagaggctagccatgcccttagtaggactagcaaaata |
| | | aggggggtagcaacagtggtgagttcgttggatggctgaagccctgagtacagggtagtcgtcag |
| | | tggttcgacgcttcggaggacaagcctcgagataccacgtggacgagggcatgcccacagcaca |
| | | tcttaacctggacgggggtcgttcaggtgaaaacggtttaaccaaccgctacgaatacagcctgat |
| | | agggtgctgcagaggcccactgtattgctactgaaaatctctgctgtacatggcac |
| 52 | Border | gtatacgggagtagctcatgcccgtatacaaaattggatattccaaaactcgattgggttagggagc |
| | Disease | cctcctagcgacggccgaaccgtgttaaccatacacgtagtaggactagcagacgggaggacta |
| | Virus | gccatcgtggtgagatccctgagcagtctaaatcctgagtacaggatagtcgtcagtagttcaacg |
| | | caggcacggttctgccttctagatgctacgtggacgagggcatgcccaagacttgctttaatctcgg |
| | | cgggggtcgccgaggtgaaaacacctaacggtgttggggttacagcctgatagggtgctgcaga |
| | | ggcccacgaataggctagtataaaaatctctgctgtacatggcac |
| 53 | BVDV2 | gtatacgagattagctaaagtactcgtatatggattggacgtcaacaaatttttaattggcaacgtagg |
| | | gaaccttcccctcagcgaaggccgaaaagaggctagccatgccccttagtaggactagcaaaagt |
| | | agggggactagcggtagcagtgagttcgttggatggccgaacccctgagtacaggggagtcgtc |
| | | aatggttcgacactccattagtcgaggagtctcgagatgccatgtggacgagggcatgcccacgg |
| | | cacatcttaacccatgcgggggttgcatgggtgaaagcgctaatcgtggcgttatggacacagcct |
| | | gatagggtgtagcagagacctgctattccgctagtaaaaaactctgctgtacatggcac |
| 54 | CSFV- | gtatacgaggttagttcattctcgtatgcattattggacaaatcaaaatttcaatttggttcagggcctc |
| | PK15C | cctccagcgacggccgaactgggctagccatgcccatagtaggactagcaaacggagggacta |
| | | gccgtagtggcgagctccctgggtgttctaagtcctgagtacaggacagtcgtcagtagttcgacg |
| | | tgagcagaagcccacctcgagatgctatgtggacgagggcatgcccaagacgcaccttaaccct |
| | | agcgggggtcgctagggtgaaatcacaccacgtgatgggagtccgacctgatagggtgctgcag |
| | | aggctcactattaggctagtataaaaatctctgctgtacatggcac |
| 55 | SF573 | aaaaccgaccccagagatcagaaagtcgttgacgcgatcttttattagaggacgttgcgctggcgc |
| | Dicistro- | gagctttaattagcagacgccaaaaataaacaacaaaatgctgatcgcgagacttaattgtcagac |
| | virus | gattggccaaatccgatgtgatctttgctgctcccagattgccgaaataggagtagtag |
| 56 | Hubei | ccccaaaaccccccccttaaactcaacactgtagtggattcattttccgttgcaaaacaaaacattac |
| | Picorna- | tacccgcatttatgtaggctctgtgttttctatgcgaccgttacattaatctctactctgacccactagt |
| | like Virus | ttataaaaccgaagacctgaatgaaacgattttccttcttttcaacctctaacgaacctctgacggcttg |
| | | agaaacctgaagttagtaattatgtttaaaagaaaggaaagtcaaacgcgatgactcttacatccctat |
| | | tccataccgttgctccacaatgtgagcgatgcgaggtcgggactgcagtattaggggaacgagct |
| | | acatggagagttaattatctctcccctcctacgggagtctcatgtgagctgtagaaagcggttggca |
| | | cctctcgttacctcgcctgtacatgatcc |
| 57 | CRPV | aaaagcaaaaatgtgatcttgcttgtaaatacaattttgagaggttaataaattacaagtagtgctatttt |
| | | tgtatttaggttagctatttagctttacgttccaggatgcctagtggcagccccacaatatccaggaag |
| | | ccctctctgcggtttttcagattaggtagtcgaaaaacctaagaaatttacct |
| 58 | Salivirus | tttcctcctttcgaccgccttacggcaggcgggtccgcggacggcttcggcctacccgcgacaag |
| | A BN5 | aatgccgtcatctgtccttatcacccatattctttcccttcccccgcaaccatcacgcttactcgcgca |
| | | cgtgttgagtggcacgtgcgttgtccaaacagttacactcacacccttggggcgggtttgtcccgcc |
| | | ctcgggttcctcgcggaaccctccctcttctctctccctttctatccgccttcactttccataactacagt |
| | | gctttggtaggtaagcatcctgaccccccgcggaagctgccaacgtggcaactgtggggatccag |
| | | gcaggttatcaaaggcacccggtctttccgccttcaggagtatccctgccggtgaattccgacagg |
| | | gctctgcttggtgccaacctcccccaaatgcgcgctgcgggagtgctcttccccaactcatcttagt |
| | | aacctctcatgtgtgtgcttggtcagcatatctgaggcgacgttccgctgtcccagaccagtccagc |
| | | aatggacgggccagtgtgcgtagtcgctttccggtttcccggcgcatgtttggcgaaacgctgagg |
| | | taaggttggtgtgcccaatgcccgtaatttggtgacacctcaagaccacccaggaatgccaggga |
| | | ggtaccccacttcggtgggatctgaccctgggctaattgtctacggtggttcttcttgcttccacttctc |
| | | ttttttctggcatg |
| 59 | Salivirus | tatggcaggcgggcttgtggacggcttcggcccacccacagcaagaatgccatcatctgtcctca |
| | A BN2 | cccccatgtttcccctttctttccctgcaaccgttacgcttactcgcaggtgcatttgagtggtgcacgt |
| | | gttgaataaacagctacactcacatgggggcgggttttcccgccctgcggcctctcgcgaggccc |
| | | acccctccccttcctcccataactacagtgctttggtaggtaagcatcctgatcccccgcggaagct |
| | | gctcacgtggcaactgtggggacccagacaggttatcaaaggcacccggtctttccgccttcagg |
| | | agtatccctgctagtgaattctagtagggctctgcttggtgccaacctcccccaaatgcgcgctgcg |
| | | ggagtgctcttccccaactcaccctagtatcctctcatgtgtgtgcttggtcagcatatctgagacgat |
| | | gttccgctgtcccagaccagtccagtaatggacgggccagtgtgcgtagtcgtcttccggcttttcc |
| | | ggcgcatgtttggtgaaccggtggggtaaggttggtgtgcccaacgcccgtactttggtgatacct |
| | | caagaccacccaggaatgccagggaggtaccccgcttcacagcgggatctgaccctgggctaat |
| | | tgtctacggtggttcttcttgcttccacttctttctactgttc |
| 60 | Salivirus | tttcgaccgccttatggcaggcgggcttgtggacggcttcggcccacccacagcaagaatgccat |
| | A | catctgtcctcacccccatttctcccctccttcccctgcaaccattacgcttactcgcatgtgcattgag |
| | 02394 | tggtgcacgtgttgaacaaacagctacactcacgtgggggcgggttttcccgcccttcggcctctc |
| | | gcgaggcccacccttccccttcctcccataactacagtgctttggtaggtaagcatcctgatccccc |
| | | gcggaagctgctcgcgtggcaactgtggggacccagacaggttatcaaaggcacccggtctttcc |
| | | gcctccaggagtatccctgctagtgaattctagtggggctctgcttggtgccaacctcccccaaatg |
| | | cgcgctgcgggagtgctcttccccaactcaccctagtatcctctcatgtgtgtgcttggtcagcatat |
| | | ctgagacgatgttccgctgtcccagaccagtccagcaatggacgggccagtgtgcgtagtcgtctt |
| | | ccggcttgtccggcgcatgtttggtgaaccggtggggtaaggttggtgtgcccaacgcccgtactt |
| | | tggtgacaactcaagaccacccaggaatgccagggaggtaccccgcctcacggcgggatctga |
| | | ccctgggctaattgtctacggtggttcttcttgcttccatttctttcttctgttc |
| 61 | Salivirus | tatggcaggcgggcttgtggacggtttcggcccacccacagcaagaatgccatcatctgtcctcac |
| | A GUT | ccccaattttccctttcttcccctgcaatcatcacgcttactcgcatgtgcattgagtggtgcatgtgtt |
| | | gaacaaacagctacactcacatgggggcgggttttcccgccctacggcctctcgcgaggcccac |
| | | ccttcccctccccttataactacagtgctttggcaggtaagcatcctgatcccccgcggaagctgct |
| | | cacgtggcaactgtggggacccagacaggttatcaaaggcacccggtctttccgccttcaggagc |
| | | atccccactagtgaattctagtggggctctgcttggtgccaacctcccccaaatgcgcgctgcggg |
| | | agtgctcttccccaacccatcctagtatcctctcatgtgtgtgcttggtcagcatatctgagacgacgt |
| | | tccgctgtcccagaccagtccagtaatggacgggccagtgtgcgtagtcgtcttccggcttgtccg |
| | | gcgcatgtttggtgaaccggtggggtaaggaggtgtgcccaacgcccgtactttggtgacacctc |
| | | aagaccacccaggaatgccagggaggtaccccgcctcacggcgggatctgaccctgggctaatt |
| | | gtctacggtggttcttcttgcttccacttctttctt |
| 62 | Salivirus | ttctcctgcaaccattacgcttaatcgcatgtgcattgagtggtgcatgtgttgaacaaacagctaca |
| | A CH | atcacatgggggcgggttttcccgccccacggcttctcgcgaggcccatccctcccttttctcccat |
| | | aactacagtgctttggtaggtaagcatcccgatctcccgcggaagctgctcacgtggcaactgtgg |
| | | ggacccagacaggttatcaaaggcacccggtctttccgccttcaggagtatccctgctagcgaatt |
| | | ctagtagggctctgcttggtgccaacctctcccaaatgcgcgctgcgggagtgctcttccccaaatc |
| | | accccagtatcctctcatgtgtgtgcctggtcagcatatctgagacgatgttccgctgtcccagacca |
| | | gtccagtaatggacgggccagtgtgcgtagtcgtcctccggcttgtccggcgcatgtttggtgaac |
| | | cggtggggtaaggttggtgtgcccaacgcccgtaatcaggggatacctcaaggcacccaggaat |
| | | gccagggaggtatcccgcctcacagcgggatctgaccctggggtaaatgtctgcggggggtcct |
| | | cttggcccaattctcagtaattttcagg |
| 63 | Salivirus | tctgtcctcaccccatcttcccttctttcctgcaccgttacgcttactcgcatgtgcattgagtggtgca |
| | A SZ1 | cgtgcttgaacaaacagctacactcacatgggggcgggttttcccgccctgcggcctctcgcgag |
| | | gcccacccctccccttcctcccataactacagtgctttggtaggtaagcatcctgatcccccgcgga |
| | | agctgctcacgtggcaactgtggggacccagacaggttatcaaaggcacccggtctttccgccttc |
| | | aggagtatccctgctagtgaattctagtagggctctgcttggtgccaacctcccccaaatgcgcgct |
| | | gcgggagtgctcttccccaactcaccctagtatcctctcatgtgtgtgcttggtcagcatatctgaga |
| | | cgatgttccgctgtcccagaccagtccagtaatggacgggccagtgtgcgtagtcgtcttccggctt |
| | | gtccggcgcatgtttggtgaaccggtggggtaaggttggtgtgcccaacgcccgtactttggtgat |
| | | acctcaagaccacccaggaatgccagggaggtaccccgcttcacagcgggatctgaccctggg |
| | | ctaattgtctacggtggttcttcttgcttccacttctttctactgttcatg |
| 64 | Salivirus | acatggggggtctgcggacggcttcggcccacccgcgacaagaatgccgtcatctgtcctcatta |
| | FHB | cccgtattccttcccttcccccgcaaccaccacgcttactcgcgcacgtgttgagtggcacgtgcgt |
| | | tgtccaaacagctacacccacacccttcggggcgggtttgtcccgccctcgggttcctcgcggaa |
| | | cccccccctccctctctctctttctatccgccctcacttcccataactacagtgctttggtaggtgagc |
| | | accctgaccccccgcggaagctgctaacgtggcaactgtggggatccaggcaggttatcaaagg |
| | | cacccggtctttccgccttcaggagtatctctgccggtgaattccggtagggctctgcttggtgcca |
| | | acctcccccaaatgcgcgctgcgggagtgctcttccccaactcatcttagtaacctctcatgtgtgtg |
| | | cttggtcagcatatctgaggcgacgttccgctgtcccagaccagtccagcaatggacgggccagt |
| | | gtgcgtagtcgctttccggttttccggcgcatgtttggcgaaacgctgaggtaaggttggtgtgccc |
| | | aacgcccgtaatttggtgatacctcaagaccacccaggaatgccagggaggtaccccacttcggt |
| | | gggatctgaccctgggctaattgtctacggtggttcttcttgcttccacttctcttttttctggcatg |
| 65 | CVB3 | ttaaaacagcctgtgggttgatcccacccacaggcccattgggcgctagcactctggtatcacggt |
| | | acctttgtgcgcctgttttataccccctcccccaactgtaacttagaagtaacacacaccgatcaaca |
| | | gtcagcgtggcacaccagccacgttttgatcaagcacttctgttaccccggactgagtatcaataga |
| | | ctgctcacgcggttgaaggagaaagcgttcgttatccggccaactacttcgaaaaacctagtaaca |
| | | ccgtggaagttgcagagtgtttcgctcagcactaccccagtgtagatcaggtcgatgagtcaccgc |
| | | attccccacgggcgaccgtggcggtggctgcgttggcggcctgcccatggggaaacccatggg |
| | | acgctctaatacagacatggtgcgaagagtctattgagctagttggtagtcctccggcccctgaatg |
| | | cggctaatcctaactgcggagcacacaccctcaagccagagggcagtgtgtcgtaacgggcaac |
| | | tctgcagcggaaccgactactttgggtgtccgtgtttcattttattcctatactggctgcttatggtgac |
| | | aattgagagatcgttaccatatagctattggattggccatccggtgactaatagagctattatatatcc |
| | | ctttgttgggtttataccacttagcagaaagaggttaaaacattacaattcattgttaagttgaatacag |
| | | caaa |
| 66 | CVB1 | ttaaaacagcctgtgggttgttcccacccacaggcccattgggcgctagcactctggtatcacggta |
| | | cctttgtgcgcctgttttacatcccctccccaaattgtaatttagaagtttcacacaccgatcattagca |
| | | agcgtggcacaccagccatgttttgatcaagcacttctgttaccccggactgagtatcaatagaccg |
| | | ctaacgcggttgaaggagaaaacgttcgttacccggccaactacttcgaaaaacctagtaacacca |
| | | tggaagttgcggagtgtttcgctcagcactaccccagtgtagatcaggtcgatgagtcaccgcgttc |
| | | cccacgggcgaccgtggcggtggctgcgttggcggcctgcctacggggaaacccgtaggacg |
| | | ctctaatacagacatggtgcgaagagtctattgagctagttggtaatcctccggcccctgaatgcgg |
| | | ctaatcctaactgcggagcacataccctcaaaccagggggcagtgtgtcgtaacgggcaactctg |
| | | cagcggaaccgactactttgggtgtccgtgtttcattttattcctatactggctgcttatggtgacaatt |
| | | gacaggttgttaccatatagttattggattggccatccggtgactaacagagcaattatatatctctttg |
| | | ttgggtttataccacttagcttgaaagaggttaaaacactacatctcatcattaaactaaatacaacaa |
| | | a |
| 67 | Echovirus | ttaaaacagcctgtgggttgttcccacccacagggcccattgggcgtcagcaccctggtatcacgg |
| | 7 | tacctttgtgcgcctgttttatatcccttcccccaattgtaacttagaagaaacacacaccgatcaaca |
| | | gcaagcgtggcacaccagccatgttttggtcaagcacttctgttaccccggactgagtatcaataga |
| | | ctgctcacgcggttgaaggagaaagcgtccgttatccggccagctacttcgagaaacctagtaac |
| | | accatggaagttgcggagtgtttcgctcagcactaccccagtgtagatcaggtcgatgagtcaccg |
| | | ctttccccacgggcgaccgtggcggtggctgcgttggcggcctgcctatgggggaacccatagg |
| | | acgctctaatacagacatggtgcgaagagtctattgagctagctggtattcctccggcccctgaatg |
| | | cggctaatcctaactgtggagcacatgcccctaatccaaggggtagtgtgtcgtaatgagcaattcc |
| | | gcagcggaaccgactactttgggtgtccgtgtttcctcttattcttgtactggctgcttatggtgacaat |
| | | tgagagattgttaccatatagctattggattggccatccggtgactaatagagctattgtgtatctcttt |
| | | gttggatttgtaccacttaatttgaaagaaatcaggacactacgctacattttactattgaacaccgca |
| | | aa |
| 68 | CVB5 | ttaaaacagcctgtgggttgtacccacccacagggcccactgggcgctagcactctggtatcacg |
| | | gtacctttgtgcgcctgttttatgcccccttcccccaattgaaacttagaagttacacacaccgatcaa |
| | | cagcgggcgtggcataccagccgcgtcttgatcaagcactcctgtttccccggaccgagtatcaat |
| | | agactgctcacgcggttgaaggagaaaacgttcgttacccggctaactacttcgagaaacctagta |
| | | gcatcatgaaagttgcgaagcgtttcgctcagcacatccccagtgtagatcaggtcgatgagtcac |
| | | cgcattccccacgggcgaccgtggcggtggctgcgttggcggcctgcctacggggcaacccgt |
| | | aggacgcttcaatacagacatggtgcgaagagtcgattgagctagttagtagtcctccggcccctg |
| | | aatccggctaatcctaactgcggagcacataccctcaacccagggggcattgtgtcgtaacgggt |
| | | aactctgcagcggaaccgactactttgggtgtccgtgtttccttttattcttataatggctgcttatggtg |
| | | acaattgaaagattgttaccatatagctattggattggccatccggtgtctaacagagctattatatac |
| | | ctctttgttggatttgtaccacttgatctaaaggaagtcaagacactacaattcatcatacaattgaaca |
| | | cagcaaa |
| 69 | EVA71 | ttaaaacagcctgtgggttgcacccactcacagggcccactgggcgcaagcactctggcacttcg |
| | | gtacctttgtgcgcctgttttatatcccctcccccaatgaaatttagaagcagcaaaccccgatcaata |
| | | gcaggcataacgctccagttatgtcttgatcaagcacttctgtttccccggactgagtatcaatagac |
| | | tgctcacgcggttgaaggagaaaacgttcgttatccggctaactacttcggaaagcctagtaacac |
| | | catggaagttgcggagagtttcgttcagcacttccccagtgtagatcaggtcgatgagtcaccgcat |
| | | tccccacgggcgaccgtggcggtggctgcgttggcggcctgcccatggggtaacccatgggac |
| | | gctctaatacggacatggtgtgaagagtctactgagctagttagtagtcctccggcccctgaatgcg |
| | | gctaatcccaactgcggagcacacgcccacaagccagtgggtagtgtgtcgtaacgggcaactct |
| | | gcagcggaaccgactactttgggtgtccgtgtttccttttattcttatgttggctgcttatggtgacaatt |
| | | aaagagttgttaccatatagctattggattggccatccggtgtgcaacagagcgatcgtttacctattt |
| | | attggttttgtaccattgacactgaagtctgtgatcacccttaattttatcttaaccctcaacacagccaa |
| | | ac |
| 70 | CVA3 | ttaaaacagcctgtgggttgtacccacccacagggcccactgggcgctagcacactggtattacg |
| | | gtacctttgtgcgcctgttttataccccccccaacctcgaaacttagaagtaaagcaaacccgatca |
| | | atagcaggtgcggcgcaccagtcgcatcttgatcaagcacttctgtaaccccggaccgagtatcaa |
| | | tagactgctcacgcggttgaaggagaaaacgttcgttacccggctaactacttcgagaaacccagt |
| | | agcatcatgaaagttgcagagtgtttcgctcagcactacccccgtgtagatcaggccgatgagtca |
| | | ccgcacttccccacgggcgaccgtggcggtggctgcgttggcggcctgcctatggggcaaccca |
| | | taggacgctctaatacggacatggtgcgaagagtctattgagctagttagtagtcctccggcccctg |
| | | aatgcggctaatcctaactgcggagcacatacccttaatccaaagggcagtgtgtcgtaacgggta |
| | | actctgcagcggaaccgactactttgggtgtccgtgtttccttttaatttttactggctgcttatggtgac |
| | | aattgaggaattgttgccatatagctattggattggccatccggtgactaacagagctattgtgttcca |
| | | atttgttggatttaccccgctcacactcacagtcgtaagaacccttcattacgtgttatttctcaactcaa |
| | | gaaa |
| 71 | CVA12 | ttaaaacagcctgtgggttgtacccacccacagggcccactgggcgctagcactctggtactacg |
| | | gtacctttgtgtgcctgttttaagcccctaccccccactcgtaacttagaaggcttctcacactcgatc |
| | | aatagtaggtgtggcacgccagtcacaccgtgatcaagcacttctgttaccccggtctgagtacca |
| | | ataagctgctaacgcggctgaaggggaaaacgatcgttatccggctaactacttcgagaaaccca |
| | | gtaccaccatgaacgttgcagggtgtttcgctcggcacaaccccagtgtagatcaggtcgatgagt |
| | | caccgtattccccacgggcgaccgtggcggtggctgcgttggcggcctgcccatggggtgaccc |
| | | atgggacgctctaatactgacatggtgcgaagagtctattgagctagttagtagtcctccggcccct |
| | | gaatgcggctaatcctaactgcggagcacatacccttaatccaaagggcagtgtgtcgtaacggg |
| | | caactctgcagcggaaccgactactttgggtgtccgtgtttccttttattcttacattggctgcttatggt |
| | | gacaattgaaaagttgttaccatatagctattggattggccatccggtgacaaatagagctattgtata |
| | | tctttttgttggttacgtaccccttaattacaaagtggtttcaactttgaaatacatcctaacactaaattg |
| | | tagaaa |
| 72 | EV24 | ttaaaacagcctgtgggttgcacccacccacagggcccacagggcgctagcactctggtatcacg |
| | | gtacctttgtgcgcctgttttattaccccttccccaattgaaaattagaagcaatgcacaccgatcaac |
| | | agcaggcgtggcgcaccagtcacgtctcgatcaagcacttctgtttccccggaccgagtatcaata |
| | | gactgctcacgcggttgaaggagaaagtgttcgttatccggctaaccacttcgagaaacccagtaa |
| | | caccatgaaagttgcagggtgtttcgctcagcacttccccagtgtagatcaggtcgatgagtcacc |
| | | gcgttccccacgggcgaccgtggcggtggctgcgttggcggcctgcctatgggttaacccatag |
| | | gacgctctaatacagacatggtgcgaagagtttattgagctggttagtatccctccggcccctgaat |
| | | gcggctaatcctaactgcggagcacgtgcctccaatccagggggttgcatgtcgtaacgggtaac |
| | | tctgcagcggaaccgactactttgggtgtccgtgtttccttttattcttatactggctgcttatggtgaca |
| | | atcgaggaattgttaccatatagctattggattggccatccggtgtctaacagagcgattatatacctc |
| | | tttgttggatttatgcagctcaataccaccaactttaacacattgaaatatatcttaaagttaaacacag |
| | | caaa |
| 348 | AP1.0 | attctcgggctacggccctggagccactccggctcctaaagatttagaagtttgagcacacccgcc |
| | | cactagggccccccatccaggggggcaacgggcaagcacttctgtttccccggtatgatctgata |
| | | ggctgtaaccacggctgaaacagagattatcgttatccgcttcactacttcgagaagcctagtaatg |
| | | atgggtgaaattgaatccgttgatccggtgtctcccccacaccagaaactcatgatgagggttgcca |
| | | tcccggctacggcgacgtagcgggcatccctgcgctggcatgaggcctcttaggaggacggatg |
| | | atatggatcttgtcgtgaagagcctattgagctagtgtcgactcctccgcccccgtgaatgcggcta |
| | | atcctaaccccggagcaggtgggtccaatccagggcctggcctgtcgtaatgcgtaagtctggga |
| | | cggaaccgactactttcgggaaggcgtgtttccatttgttcattatttgtgtgtttatggtgacaactctg |
| | | ggtaaacgttctattgcgtttattgagagattcccaacaattgaacaaacgagaactacctgttttatta |
| | | aatttacacagagaagaattaca |
| 349 | CK1.0 | gtggccacgcccgggccaccgatacttcccttcactccttcgggactgttggggaggaacacaac |
| | | agggctcccctgttttcccattccttcccccttttcccaaccccaaccgccgtatctggtggcggcaa |
| | | gacacacgggtctttccctctaaagcacaattgtgtgtgtgtcccaggtcctcctgcgtacggtgcg |
| | | ggagtgctcccacccaactgttgtaagcctgtccaacgcgtcgtcctggcaagactatgacgtcgc |
| | | atgttccgctgcggatgccgaccgggtaaccggttccccagtgtgtgtagtgcgatcttccaggtc |
| | | ctcctggttggcgttgtccagaaactgcttcaggtaagtggggtgtgcccaatccctacaaaggttg |
| | | attctttcaccaccttaggaatgctccggaggtaccccagcaacagctgggatctgaccggaggct |
| | | aattgtctacgggtggtgtttcctttttcttttcacacaactctactgctgacaactcactgactatccact |
| | | tgctctgTcacG |
| 350 | PV1.0 | aacaaaaggctacaccacttgggctacggcccgcgccaccttgtggcgcaaagacattagaaga |
| | | atagcataccgcccactagggccctgcagccagcagggtaacgggcaagcacttctgtctcccc |
| | | ggtagaacggtataggctgtacccacggccgaaaactgaactatcgttacccgactccgtacttcg |
| | | caaagcttagtaggaaactggaaagttcgagttattgacccggagtgttccccccactccagaaac |
| | | gcgtgatgagggttgccaccccgaccatggcgacatggtgggcatccctgcgctggcacgcgg |
| | | cctctaagaggataactcgctcctactggtaaccgaagagccccgtgagctacggtttattcctccg |
| | | cctccctgaatgcggctaatcctaacccatgagcagttgccatagatccatatggtggactgtcgta |
| | | acgcgtaagttgtgggcggaaccgactactttgggatggcgtgtttccttgttttctccatttgttgttgt |
| | | atggtgacaagttatagatctcgatctatagcgtttcttgagagatttccaaacatttattcaagtcgta |
| | | caattcttgtgtttaagcagtacagtgtaacc |
| 351 | SV1.0 | tctgtcctcaccccatcttcccttctttcctgcaccgttacgcttactcgcatgtgcattgagtggtgca |
| | | cgtgcttgaacaaacagctacactcacatgggggcgggttttcccgccctgcggcctctcgcgag |
| | | gcccacccctccccttcctcccataactacagtgctttggtaggtaagcatcctgatcccccgcgga |
| | | agctgctcacgtggcaactgtggggacccagacaggttatcaaaggcacccggtctttccgccttc |
| | | aggagtatccctgctagtgaattctagtagggctctgcttggtgccaacctcccccaaatgcgcgct |
| | | gcgggagtgctcttccccaactcaccctagtatcctctcatgtgtgtgcttggtcagcatatctgaga |
| | | cgatgttccgctgtcccagaccagtccagtaatggacgggccagtgtgcgtagtcgtcttccggctt |
| | | gtccggcgcatgtttggtgaaccggtggggtaaggttggtgtgcccaacgcccgtactttggtgat |
| | | acctcaagaccacccaggaatgccagggaggtaccccgcttcacagcgggatctgaccctggg |
| | | ctaattgtctacggtggttcttcttgcttccacttctttctactgttcgccacc |
| 352 | Caprine | gtggccacgcccgggccaccgatacttcccttcactccttcgggactgttggggaggaacacaac |
| | Kobuvirus | agggctcccctgttttcccattccttcccccttttcccaaccccaaccgccgtatctggtggcggcaa |
| | 5Δ40 | gacacacgggtctttccctctaaagcacaattgtgtgtgtgtcccaggtcctcctgcgtacggtgcg |
| | | ggagtgctcccacccaactgttgtaagcctgtccaacgcgtcgtcctggcaagactatgacgtcgc |
| | | atgttccgctgcggatgccgaccgggtaaccggttccccagtgtgtgtagtgcgatcttccaggtc |
| | | ctcctggttggcgttgtccagaaactgcttcaggtaagtggggtgtgcccaatccctacaaaggttg |
| | | attctttcaccaccttaggaatgctccggaggtaccccagcaacagctgggatctgaccggaggct |
| | | aattgtctacgggtggtgtttcctttttcttttcacacaactctactgctgacaactcactgactatc |
| | | cacttgctctcttgtgcctttctgctctggttcaagttccttgattgtttttgactgcttttcactgctt |
| | | ttcttctcacaatccttgctcagttcaaagtc |
| 353 | Caprine | gtggccacgcccgggccaccgatacttcccttcactccttcgggactgttggggaggaacacaac |
| | Kobuvirus | agggctcccctgttttcccattccttcccccttttcccaaccccaaccgccgtatctggtggcggcaa |
| | 5Δ40/3Δ122 | gacacacgggtctttccctctaaagcacaattgtgtgtgtgtcccaggtcctcctgcgtacggtgcg |
| | | ggagtgctcccacccaactgttgtaagcctgtccaacgcgtcgtcctggcaagactatgacgtcgc |
| | | atgttccgctgcggatgccgaccgggtaaccggttccccagtgtgtgtagtgcgatcttccaggtc |
| | | ctcctggttggcgttgtccagaaactgcttcaggtaagtggggtgtgcccaatccctacaaaggttg |
| | | attctttcaccaccttaggaatgctccggaggtaccccagcaacagctgggatctgaccggaggct |
| | | aattgtctacgggtggtgtttcctttttcttttcacacaactaaagtc |
| 354 | Caprine | gtggccacgcccgggccaccgatacttcccttcactccttcgggactgttggggaggaacacaac |
| | Kobuvirus | agggctcccctgttttcccattccttcccccttttcccaaccccaaccgccgtatctggtggcggcaa |
| | 5Δ40/3Δ86_ | gacacacgggtctttccctctaaagcacaattgtgtgtgtgtcccaggtcctcctgcgtacggtgcg |
| | Distal | ggagtgctcccacccaactgttgtaagcctgtccaacgcgtcgtcctggcaagactatgacgtcgc |
| | | atgaccgctgcggatgccgaccgggtaaccggttccccagtgtgtgtagtgcgatcttccaggtc |
| | | ctcctggttggcgttgtccagaaactgcttcaggtaagtggggtgtgcccaatccctacaaaggttg |
| | | attctttcaccaccttaggaatgctccggaggtaccccagcaacagctgggatctgaccggaggct |
| | | aattgtctacgggtggtgtttcctttttcttttcacacaactctactgctgacaactcactgactatccact |
| | | tgctctaaagtc |
| 355 | Caprine | gtggccacgcccgggccaccgatacttcccttcactccttcgggactgttggggaggaacacaac |
| | Kobuvirus | agggctcccctgttttcccattccttcccctttttcccaaccccaaccgccgtatctggtggcggcaa |
| | 5Δ40/3Δ | gacacacgggtctttccctctaaagcacaattgtgtgtgtgtcccaggtcctcctgcgtacggtgcg |
| | 122_Kozak | ggagtgctcccacccaactgttgtaagcctgtccaacgcgtcgtcctggcaagactatgacgtcgc |
| | | atgttccgctgcggatgccgaccgggtaaccggttccccagtgtgtgtagtgcgatcttccaggtc |
| | | ctcctggttggcgttgtccagaaactgcttcaggtaagtggggtgtgcccaatccctacaaaggttg |
| | | attctttcaccaccttaggaatgctccggaggtaccccagcaacagctgggatctgaccggaggct |
| | | aattgtctacgggtggtgtttcctttttcttttcacacaactgccacc |
| 356 | Caprine | gtggccacgcccgggccaccgatacttcccttcactccttcgggactgttggggaggaacacaac |
| | Kobuvirus | agggctcccctgttttcccattccttcccccttttcccaaccccaaccgccgtatctggtggcggcaa |
| | 5Δ440/3Δ86 | gacacacgggtctttccctctaaagcacaattgtgtgtgtgtcccaggtcctcctgcgtacggtgcg |
| | Proximal | ggagtgctcccacccaactgttgtaagcctgtccaacgcgtcgtcctggcaagactatgacgtcgc |
| | | atgttccgctgcggatgccgaccgggtaaccggttccccagtgtgtgtagtgcgatcttccaggtc |
| | | ctcctggttggcgttgtccagaaactgcttcttggtaagtggggtgtgcccaatccctacaaaggttg |
| | | attctttcaccaccttaggaatgctccggaggtaccccagcaacagctgggatctgaccggaggct |
| | | aattgtctacgggtggtgtttcctttttcttttcacacaactttcactgcttttcttctcacaatccttgc |
| | | tcagttcaaagtc |
| 357 | Parabovirus | tgaaccgttacgcaccactcagttggtgtttggtggcaccaatgatggaacaaaaggctacaccac |
| | | ttgggctacggcccgcgccaccttgtggcgcaaagacattagaagaatagcataccgcccactag |
| | | ggccctgcagccagcagggtaacgggcaagcacttctgtctccccggtagaacggtataggctgt |
| | | acccacggccgaaaactgaactatcgttacccgactccgtacttcgcaaagcttagtaggaaactg |
| | | gaaagttcgagttattgacccggagtgttccccccactccagaaacgcgtgatgagggttgccacc |
| | | ccgaccatggcgacatggtgggcatccctgcgctggcacgcggcctctaagaggataactcgct |
| | | cctactggtaaccgaagagccccgtgagctacggtttattcctccgcctccctgaatgcggctaatc |
| | | ctaacccatgagcagttgccatagatccatatggtggactgtcgtaacgcgtaagttgtgggcgga |
| | | accgactactttgggatggcgtgtttccttgttttctccatttgttgttgtatggtgacaagttatagatct |
| | | cgatctatagcgtttcttgagagatttccaaacatttattcaagtcgtacaattcttgtgtttaagcagta |
| | | cagtgtaagg |
| 358 | Parabovirus | aacaaaaggctacaccacttgggctacggcccgcgccaccttgtggcgcaaagacattagaaga |
| | 5Δ48 | atagcataccgcccactagggccctgcagccagcagggtaacgggcaagcacttctgtctcccc |
| | | ggtagaacggtataggctgtacccacggccgaaaactgaactatcgttacccgactccgtacttcg |
| | | caaagcttagtaggaaactggaaagttcgagttattgacccggagtgttccccccactccagaaac |
| | | gcgtgatgagggttgccaccccgaccatggcgacatggtgggcatccctgcgctggcacgcgg |
| | | cctctaagaggataactcgctcctactggtaaccgaagagccccgtgagctacggtttattcctccg |
| | | cctccctgaatgcggctaatcctaacccatgagcagttgccatagatccatatggtggactgtcgta |
| | | acgcgtaagttgtgggcggaaccgactactttgggatggcgtgtttccttgttttctccatttgttgttgt |
| | | atggtgacaagttatagatctcgatctatagcgtttcttgagagatttccaaacatttattcaagtcgta |
| | | caattcttgtgtttaagcagtacagtgtaagg |
| 359 | Parabovirus | tgggctacggcccgcgccaccttgtggcgcaaagacattagaagaatagcataccgcccactag |
| | 5Δ67 | ggccctgcagccagcagggtaacgggcaagcacttctgtctccccggtagaacggtataggctgt |
| | | acccacggccgaaaactgaactatcgttacccgactccgtacttcgcaaagcttagtaggaaactg |
| | | gaaagttcgagttattgacccggagtgttccccccactccagaaacgcgtgatgagggttgccacc |
| | | ccgaccatggcgacatggtgggcatccctgcgctggcacgcggcctctaagaggataactcgct |
| | | cctactggtaaccgaagagccccgtgagctacggtttattcctccgcctccctgaatgcggctaatc |
| | | ctaacccatgagcagttgccatagatccatatggtggactgtcgtaacgcgtaagttgtgggcgga |
| | | accgactactttgggatggcgtgtttccttgttttctccatttgttgttgtatggtgacaagttatagatct |
| | | cgatctatagcgtttcttgagagatttccaaacatttattcaagtcgtacaattcttgtgtttaagcagta |
| | | cagtgtaagg |
| 360 | Parabovirus | tgaaccgttacgcaccactcagttggtgtttggtggcaccaatgatggaacaaaaggctacaccac |
| | 3Δ60 | ttgggctacggcccgcgccaccttgtggcgcaaagacattagaagaatagcataccgcccactag |
| | | ggccctgcagccagcagggtaacgggcaagcacttctgtctccccggtagaacggtataggctgt |
| | | acccacggccgaaaactgaactatcgttacccgactccgtacttcgcaaagcttagtaggaaactg |
| | | gaaagttcgagttattgacccggagtgttccccccactccagaaacgcgtgatgagggttgccacc |
| | | ccgaccatggcgacatggtgggcatccctgcgctggcacgcggcctctaagaggataactcgct |
| | | cctactggtaaccgaagagccccgtgagctacggtttattcctccgcctccctgaatgcggctaatc |
| | | ctaacccatgagcagttgccatagatccatatggtggactgtcgtaacgcgtaagttgtgggcgga |
| | | accgactactttgggatggcgtgtttccttgttttctccatttgttgttgtatggtgacaagttatagatct |
| | | cgatctatagcgtttgtaagg |
| 361 | Apodemus | tttgaaaggggtgcggatatcatggcgtttctcgccatgatatccgcacattgcaaacccatattgca |
| | Picornavirus | tacccactgggtatgcattatggggaggcccctttcacccctccccccccaattaccttttccccctct |
| | | agtaaccatacgctttactcagcgtaactactccgggttacgtgatgaagaagaggctacggagatt |
| | | ctcgggctacggccctggagccactccggctcctaaagatttagaagtttgagcacacccgccca |
| | | ctagggccccccatccaggggggcaacgggcaagcacttctgtttccccggtatgatctgatagg |
| | | ctgtaaccacggctgaaacagagattatcgttatccgcttcactacttcgagaagcctagtaatgatg |
| | | ggtgaaattgaatccgttgatccggtgtctcccccacaccagaaactcatgatgagggttgccatcc |
| | | cggctacggcgacgtagcgggcatccctgcgctggcatgaggcctcttaggaggacggatgata |
| | | tggatcttgtcgtgaagagcctattgagctagtgtcgactcctccgcccccgtgaatgcggctaatc |
| | | ctaaccccggagcaggtgggtccaatccagggcctggcctgtcgtaatgcgtaagtctgggacg |
| | | gaaccgactactttcgggaaggcgtgtttccatttgttcattatttgtgtgtttatggtgacaactctgg |
| | | gtaaacgttctattgcgtttattgagagattcccaacaattgaacaaacgagaactacctgttttattaa |
| | | atttacacagagaagaattaca |
| 362 | Apodemus | cccctccccccccaattaccttttccccctctagtaaccatacgctttactcagcgtaactactccggg |
| | Picornavirus | ttacgtgatgaagaagaggctacggagattctcgggctacggccctggagccactccggctccta |
| | 5Δ105 | aagatttagaagtttgagcacacccgcccactagggccccccatccaggggggcaacgggcaa |
| | | gcacttctgtttccccggtatgatctgataggctgtaaccacggctgaaacagagattatcgttatcc |
| | | gcttcactacttcgagaagcctagtaatgatgggtgaaattgaatccgttgatccggtgtctccccca |
| | | caccagaaactcatgatgagggttgccatcccggctacggcgacgtagcgggcatccctgcgct |
| | | ggcatgaggcctcttaggaggacggatgatatggatcttgtcgtgaagagcctattgagctagtgtc |
| | | gactcctccgcccccgtgaatgcggctaatcctaaccccggagcaggtgggtccaatccagggc |
| | | ctggcctgtcgtaatgcgtaagtctgggacggaaccgactactttcgggaaggcgtgtttccatttgt |
| | | tcattatttgtgtgtttatggtgacaactctgggtaaacgttctattgcgtttattgagagattcccaaca |
| | | attgaacaaacgagaactacctgttttattaaatttacacagagaagaattaca |
| 363 | Apodemus | attctcgggctacggccctggagccactccggctcctaaagatttagaagtttgagcacacccgcc |
| | Picornavirus | cactagggccccccatccaggggggcaacgggcaagcacttctgtttccccggtatgatctgata |
| | 5Δ201 | ggctgtaaccacggctgaaacagagattatcgttatccgcttcactacttcgagaagcctagtaatg |
| | | atgggtgaaattgaatccgttgatccggtgtctcccccacaccagaaactcatgatgagggttgcca |
| | | tcccggctacggcgacgtagcgggcatccctgcgctggcatgaggcctcttaggaggacggatg |
| | | atatggatcttgtcgtgaagagcctattgagctagtgtcgactcctccgcccccgtgaatgcggcta |
| | | atcctaaccccggagcaggtgggtccaatccagggcctggcctgtcgtaatgcgtaagtctggga |
| | | cggaaccgactactttcgggaaggcgtgtttccatttgttcattatttgtgtgtttatggtgacaactctg |
| | | ggtaaacgttctattgcgtttattgagagattcccaacaattgaacaaacgagaactacctgttttatta |
| | | aatttacacagagaagaattaca |
| 364 | Kobuvirus | ttcacaccctctttccggtggtccggacccagaccaccgttactccattcagctacttcggtacctg |
| | SZAL6 | ttcggaggaattaaacgggcaccctacccaagggttacatgggaccatattcctcctcccctgtaac |
| | | tttaagtttgtgcccgtattcttgactccaggcggatgttgtgtcgcccgtcctgtgaacaaacagct |
| | | agacactttcctcccctccctctgggctgctccggcagtccactccctccccccagcgtaacatgcc |
| | | ccgctggagtgatgcacctggaagtcgtggacgtgggttagtaacttcggtgaaaacccactataa |
| | | tgacaactggttgacccccacactcaaaggactcgagtctttctcccttaaggctagcccggccac |
| | | atgaatttgcagctggcaactagtgagtccaccatgtcccgcaacctcggctgcggagtgctgttc |
| | | cccaagcgtatgccttccttctgtaagagtgcgcctggcaagcacatctgagaagtcgttccgctgc |
| | | gtcgtgccaacctggcgacaggtgacccagtgtgcgtagacttcttccggattcgtccggctcttct |
| | | ctaggaaacatgcgtgtaaggttcatgtgccaaagccctgcgcgcggtgttcttctactgccctagg |
| | | aatgtgccgcaggtacccctacttcggtagggatctgagcggtagctaattgtctacgggtagtttc |
| | | atttccatcttctcttcaggtcgacatc |
| 365 | Kobuvirus | ttgactccaggcggatgttgtgtcgcccgtcctgtgaacaaacagctagacactttcctcccctccct |
| | SZAL6 5Δ158 | ctgggctgctccggcagtccactccctccccccagcgtaacatgccccgctggagtgatgcacct |
| | | ggaagtcgtggacgtgggttagtaacttcggtgaaaacccactataatgacaactggttgaccccc |
| | | acactcaaaggactcgagtctttctcccttaaggctagcccggccacatgaatttgcagctggcaac |
| | | tagtgagtccaccatgtcccgcaacctcggctgcggagtgctgttccccaagcgtatgccttccttc |
| | | tgtaagagtgcgcctggcaagcacatctgagaagtcgttccgctgcgtcgtgccaacctggcgac |
| | | aggtgacccagtgtgcgtagacttcttccggattcgtccggctcttctctaggaaacatgcgtgtaa |
| | | ggttcatgtgccaaagccctgcgcgcggtgttcttctactgccctaggaatgtgccgcaggtaccc |
| | | ctacttcggtagggatctgagcggtagctaattgtctacgggtagtttcatttccatcttctcttcaggt |
| | | cgacatc |
| 366 | Kobuvirus | gaattaaacgggcaccctacccaagggttacatgggaccatattcctcctcccctgtaactttaagtt |
| | SZAL6 5Δ76 | ttgtgcccgtattcttgactccaggcggatgttgtgtcgcccgtcctgtgaacaaacagctagacact |
| | | ttcctcccctccctctgggctgctccggcagtccactccctccccccagcgtaacatgccccgctg |
| | | gagtgatgcacctggaagtcgtggacgtgggttagtaacttcggtgaaaacccactataatgacaa |
| | | ctggttgacccccacactcaaaggactcgagtctttctcccttaaggctagcccggccacatgaatt |
| | | tgcagctggcaactagtgagtccaccatgtcccgcaacctcggctgcggagtgctgttccccaag |
| | | cgtatgccttccttctgtaagagtgcgcctggcaagcacatctgagaagtcgttccgctgcgtcgtg |
| | | ccaacctggcgacaggtgacccagtgtgtgtagacttcttccggattcgtccggctcttctctagga |
| | | aacatgcgtgtaaggttcatgtgccaaagccctgcgcgcggtgttcttctactgccctaggaatgtg |
| | | ccgcaggtacccctacttcggtagggatctgagcggtagctaattgtctacgggtagtttcatttcca |
| | | tcttctcttcaggtcgacatc |
| 367 | Kobuvirus | tttcacaccctcttttccggtggtccggacccagaccaccgttactccattcagctacttcggtacctg |
| | SZAL6 3Δ37 | ttcggaggaattaaacgggcaccctacccaagggttacatgggaccatattcctcctcccctgtaac |
| | | tttaagttttgtgcccgtattcttgactccaggcggatgttgtgtcgcccgtcctgtgaacaaacagct |
| | | agacactttcctcccctccctctgggctgctccggcagtccactccctccccccagcgtaacatgcc |
| | | ccgctggagtgatgcacctggaagtcgtggacgtgggttagtaacttcggtgaaaacccactataa |
| | | tgacaactggttgacccccacactcaaaggactcgagtctttctcccttaaggctagcccggccac |
| | | atgaatttgcagctggcaactagtgagtccaccatgtcccgcaacctcggctgcggagtgctgttc |
| | | cccaagcgtatgccttccttctgtaagagtgcgcctggcaagcacatctgagaagtcgttccgctgc |
| | | gtcgtgccaacctggcgacaggtgacccagtgtgcgtagacttcttccggattcgtccggctcttct |
| | | ctaggaaacatgcgtgtaaggttcatgtgccaaagccctgcgcgcggtgttcttctactgccctagg |
| | | aatgtgccgcaggtacccctacttcggtagggatctgagcggtagctaattggacatc |
| 368 | Salivirus | tctgtcctcaccccatcttcccttctttcctgcaccgttacgcttactcgcatgtgcattgagtggtgca |
| | SZ1 | cgtgcttgaacaaacagctacactcacatgggggcgggttttcccgccctgcggcctctcgcgag |
| | | gcccacccctccccttcctcccataactacagtgctttggtaggtaagcatcctgatcccccgcgga |
| | | agctgctcacgtggcaactgtggggacccagacaggttatcaaaggcacccggtctttccgccttc |
| | | aggagtatccctgctagtgaattctagtagggctctgcttggtgccaacctcccccaaatgcgcgct |
| | | gcgggagtgctcttccccaactcaccctagtatcctctcatgtgtgtgcttggtcagcatatctgaga |
| | | cgatgttccgctgtcccagaccagtccagtaatggacgggccagtgtgcgtagtcgtcttccggctt |
| | | gtccggcgcatgtttggtgaaccggtggggtaaggttggtgtgcccaacgcccgtactttggtgat |
| | | acctcaagaccacccaggaatgccagggaggtaccccgcttcacagcgggatctgaccctggg |
| | | ctaattgtctacggtggttcttcttgcttccacttctttctactgttcatg |
| 369 | Crohivirus | gtataagagacaggtgtttgccttgtcttcggactggcatcttgggaccaaccccccttttccccagc |
| | B | catgggttaaatggcaataaaggacgtaacaactttgtaaccattaagctttgtaattttgtaaccact |
| | | aagctttgtgcacataatgtaaccatcaagcttgttagtcccagcaggaggtttgcatgcttgtagcc |
| | | gaaatggggctcgaccccccatagtaggatacttgattttgcattccattgtggacctgcaaactcta |
| | | cacatagaggctttgtcttgcatctaaacacctgagtacagtgtgtacctagaccctatagtacggga |
| | | ggaccgtttgtttcctcaataaccctacataataggctaggtgggcatgcccaatttgcaagatccca |
| | | gactgggggtcggtctgggcagggttagatccctgttagctactgcctgatagggtggtgctcaac |
| | | catgtgtagtttaaattgagctgttcatatacc |
| 370 | Crohivirus | ccccccttttccccagccatgggttaaatggcaataaaggacgtaacaactttgtaaccattaagctt |
| | B 5Δ51 | tgtaattttgtaaccactaagctttgtgcacataatgtaaccatcaagcttgttagtcccagcaggagg |
| | | tttgcatgcttgtagccgaaatggggctcgaccccccatagtaggatacttgattttgcattccattgt |
| | | ggacctgcaaactctacacatagaggctttgtcttgcatctaaacacctgagtacagtgtgtacctag |
| | | accctatagtacgggaggaccgtttgtttcctcaataaccctacataataggctaggtgggcatgcc |
| | | caatttgcaagatcccagactgggggtcggtctgggcagggttagatccctgttagctactgcctg |
| | | atagggtggtgctcaaccatgtgtagtttaaattgagctgttcatatacc |
| 371 | CVB3 | ttaaaacagcctgtgggttgatcccacccacagggcccattgggcgctagcactctggtatcacgg |
| | | tacctttgtgcgcctgttttataccccctcccccaactgtaacttagaagtaacacacaccgatcaac |
| | | agtcagcgtggcacaccagccacgttttgatcaagcacttctgttaccccggactgagtatcaatag |
| | | actgctcacgcggttgaaggagaaagcgttcgttatccggccaactacttcgaaaaacctagtaac |
| | | accgtggaagttgcagagtgtttcgctcagcactaccccagtgtagatcaggtcgatgagtcaccg |
| | | cattccccacgggcgaccgtggcggtggctgcgttggcggcctgcccatggggaaacccatgg |
| | | gacgctctaatacagacatggtgcgaagagtctattgagctagaggtagtcctccggcccctgaat |
| | | gcggctaatcctaactgcggagcacacaccctcaagccagagggcagtgtgtcgtaacgggcaa |
| | | ctctgcagcggaaccgactactttgggtgtccgtgtttcattttaacctatactggctgcttatggtga |
| | | caattgagagattgttaccatatagctattggattggccatccggtgaccaatagagctattatatatct |
| | | ctttgttgggtttataccacttagcttgaaagaggttaaaacattacaattcattgttaagttgaatacag |
| | | caaa |
| 372 | CVB3 3Δ91 | ttaaaacagcctgtgggttgatcccacccacagggcccattgggcgctagcactctggtatcacgg |
| | | tacctttgtgcgcctgttttataccccctcccccaactgtaacttagaagtaacacacaccgatcaac |
| | | agtcagcgtggcacaccagccacgttttgatcaagcacttctgttaccccggactgagtatcaatag |
| | | actgctcacgcggttgaaggagaaagcgttcgttatccggccaactacttcgaaaaacctagtaac |
| | | accgtggaagttgcagagtgtttcgctcagcactaccccagtgtagatcaggtcgatgagtcaccg |
| | | cattccccacgggcgaccgtggcggtggctgcgttggcggcctgcccatggggaaacccatgg |
| | | gacgctctaatacagacatggtgcgaagagtctattgagctagttggtagtcctccggcccctgaat |
| | | gcggctaatcctaactgcggagcacacaccctcaagccagagggcagtgtgtcgtaacgggcaa |
| | | ctctgcagcggaaccgactactttgggtgtccgtgtttcattttattcctatactggctgcttatggtga |
| | | caattgagagattgttaccatatagctattggattggccatccggtgaagcaaa |
| 373 | SAFV | cacttatttaattcggccttttgtgacaagcccctcggtgaaagaacctctctcttttcgacgtggttgg |
| | | aattgccatcatttccgacgaaagtgctatcatgcctccccgattatgtgatgttttctgccctgctgg |
| | | gcggagcattctcgggttgagaaaccttgaatctttttctttggaaccttggttcccccggtctaagcc |
| | | gcttggaatatgacagggttattttcttgatcttatttctacttttgcgggttctatccgtaaaaagggtac |
| | | gtgctgccccttccttctctggagaattcacacggcggtctttccgtctctcaacaagtgtgaatgca |
| | | gcatgccggaaacggtgaagaaaacagttttctgtggaaatttagagtgcacatcgaaacagctgt |
| | | agcgacctcacagtagcagcggactcccctcttggcgacaagagcctctgcggccaaaagcccc |
| | | gtggataagatccactgctgtgagcggtgcaaccccagcaccctggttcgatgatcattctctatgg |
| | | aaccagaaaatggttttctcaagccctccggtagagaagccaagaatgtcctgaaggtaccccgc |
| | | gtgcgggatctgatcaggagaccaattggcggtgctttacactgtcactttggtttaaaaattgtcac |
| | | agcttctccaaaccaagtggtcttggttttccaattttgttga |
| 374 | SAFV 5Δ46 | cctctctcttttcgacgtggttggaattgccatcatttccgacgaaagtgctatcatgcctccccgatta |
| | | tgtgatgttttctgccctgctgggcggagcattctcgggttgagaaaccttgaatctttttctttggaac |
| | | cttggttcccccggtctaagccgcttggaatatgacagggttattttcttgatcttatttctacttttgcgg |
| | | gttctatccgtaaaaagggtacgtgctgccccttccttctctggagaattcacacggcggtctttccgt |
| | | ctctcaacaagtgtgaatgcagcatgccggaaacggtgaagaaaacagttttctgtggaaatttaga |
| | | gtgcacatcgaaacagctgtagcgacctcacagtagcagcggactcccctcttggcgacaagag |
| | | cctctgcggccaaaagccccgtggataagatccactgctgtgagcggtgcaaccccagcaccct |
| | | ggttcgatgatcattctctatggaaccagaaaatggttttctcaagccctccggtagagaagccaag |
| | | aatgtcctgaaggtaccccgcgtgcgggatctgatcaggagaccaattggcggtgctttacactgt |
| | | cactttggtttaaaaattgtcacagcttctccaaaccaagtggtcttggttttccaattttgttga |
| 375 | SAFV 5Δ93 | gtgctatcatgcctccccgattatgtgatgttttctgccctgctgggcggagcattctcgggttgaga |
| | | aaccttgaatctttttctttggaaccttggttcccccggtctaagccgcttggaatatgacagggttattt |
| | | tcttgatcttatttctacttttgcgggttctatccgtaaaaagggtacgtgctgccccttccttctctgga |
| | | gaattcacacggcggtctttccgtctctcaacaagtgtgaatgcagcatgccggaaacggtgaaga |
| | | aaacagttttctgtggaaatttagagtgcacatcgaaacagctgtagcgacctcacagtagcagcg |
| | | gactcccctcttggcgacaagagcctctgcggccaaaagccccgtggataagatccactgctgtg |
| | | agcggtgcaaccccagcaccctggttcgatgatcattctctatggaaccagaaaatggttttctcaa |
| | | gccctccggtagagaagccaagaatgtcctgaaggtaccccgcgtgcgggatctgatcaggaga |
| | | ccaattggcggtgctttacactgtcactttggtttaaaaattgtcacagcttctccaaaccaagtggtct |
| | | tggttttccaattttgttga |
| 376 | SAFV 3Δ47 | cacttatttaattcggccttttgtgacaagcccctcggtgaaagaacctctctcttttcgacgtggttgg |
| | | aattgccatcatttccgacgaaagtgctatcatgcctccccgattatgtgatgttttctgccctgctgg |
| | | gcggagcattctcgggttgagaaaccttgaatctttttctttggaaccttggttcccccggtctaagcc |
| | | gcttggaatatgacagggttattttcttgatcttatttctacttttgcgggttctatccgtaaaaagggtac |
| | | gtgctgccctttccttctctggagaattcacacggcggtctttccgtctctcaacaagtgtgaatgca |
| | | gcatgccggaaacggtgaagaaaacagttttctgtggaaatttagagtgcacatcgaaacagctgt |
| | | agcgacctcacagtagcagcggactcccctcttggcgacaagagcctctgcggccaaaagcccc |
| | | gtggataagatccactgctgtgagcggtgcaaccccagcaccctggttcgatgatcattctctatgg |
| | | aaccagaaaatggttttctcaagccctccggtagagaagccaagaatgtcctgaaggtaccccgc |
| | | gtgcgggatctgatcaggagaccaattggcggtgctttacactgtcactttggtttaatgttga |
| 377 | SAFV Kozak | cacttatttaattcggccttttgtgacaagcccctcggtgaaagaacctctctcttttcgacgtggttgg |
| | | aattgccatcatttccgacgaaagtgctatcatgcctccccgattatgtgatgttttctgccctgctgg |
| | | gcggagcattctcgggttgagaaaccttgaatattttctttggaaccttggttcccccggtctaagcc |
| | | gcttggaatatgacagggttattttcttgatcttatttctacttttgcgggttctatccgtaaaaagggtac |
| | | gtgctgccccttccttctctggagaattcacacggcggtctttccgtctctcaacaagtgtgaatgca |
| | | gcatgccggaaacggtgaagaaaacagttttctgtggaaatttagagtgcacatcgaaacagctgt |
| | | agcgacctcacagtagcagcggactcccctcttggcgacaagagcctctgcggccaaaagcccc |
| | | gtggataagatccactgctgtgagcggtgcaaccccagcaccctggttcgatgatcattctctatgg |
| | | aaccagaaaatggttttctcaagccctccggtagagaagccaagaatgtcctgaaggtaccccgc |
| | | gtgcgggatctgatcaggagaccaattggcggtgctttacactgtcactttggtttaaaaattgtcac |
| | | agcttctccaaaccaagtggtcttggttttccaattttgttgaccgcc |
| 378 | GLuc CK | gtggccacgcccgggccaccgatacttcccttcactccttcgggactgttggggaggaacacaac |
| | dCTG1 | agggctcccctgttttcccattccttcccccttttcccaaccccaaccgccgtatctggtggcggcaa |
| | | gacacacgggtctttccctctaaagcacaattgtgtgtgtgtcccaggtcctcctgcgtacggtgcg |
| | | ggagtgctcccacccaactgttgtaagcctgtccaacgcgtcgtcctggcaagactatgacgtcgc |
| | | atgttccgctgcggatgccgaccgggtaaccggttccccagtgtgtgtagtgcgatcttccaggtc |
| | | ctcctggttggcgttgtccagaaactgcttcaggtaagtggggtgtgcccaatccctacaaaggttg |
| | | attctttcaccaccttaggaatgctccggaggtaccccagcaacagctgggatctgaccggaggct |
| | | aattgtctacgggtggtgtttcctttttcttttcacacaactctacGTctgacaactcactgactatcca |
| | | cttgctctaaagtc |
| 379 | GLuc CK | gtggccacgcccgggccaccgatacttcccttcactccttcgggactgttggggaggaacacaac |
| | dCTG1_2 | agggctcccctgttttcccattccttcccccttttcccaaccccaaccgccgtatctggtggcggcaa |
| | | gacacacgggtctttccctctaaagcacaattgtgtgtgtgtcccaggtcctcctgcgtacggtgcg |
| | | ggagtgctcccacccaactgttgtaagcctgtccaacgcgtcgtcctggcaagactatgacgtcgc |
| | | atgttccgctgcggatgccgaccgggtaaccggttccccagtgtgtgtagtgcgatcttccaggtc |
| | | ctcctggttggcgttgtccagaaactgcttcaggtaagtggggtgtgcccaatccctacaaaggttg |
| | | attctttcaccaccttaggaatgctccggaggtaccccagcaacagctgggatctgaccggaggct |
| | | aattgtctacgggtggtgtttcctttttcttttcacacaactctacGTcGTacaactcactgactatcc |
| | | acttgctctaaagtc |
| 380 | GLuc CK | gtggccacgcccgggccaccgatacttcccttcactccttcgggactgttggggaggaacacaac |
| | dCTG1_2_3 | agggctcccctgttttcccctttccttcccccttttcccaaccccaaccgccgtatctggtggcggcaa |
| | | gacacacgggtctttccctctaaagcacaattgtgtgtgtgtcccaggtcctcctgcgtacggtgcg |
| | | ggagtgctcccacccaactgttgtaagcctgtccaacgcgtcgtcctggcaagactatgacgtcgc |
| | | atgttccgctgcggatgccgaccgggtaaccggttccccagtgtgtgtagtgcgatcttccaggtc |
| | | ctcctggttggcgttgtccagaaactgcttcaggtaagtggggtgtgcccaatccctacaaaggttg |
| | | attctttcaccaccttaggaatgctccggaggtaccccagcaacagctgggatctgaccggaggct |
| | | aattgtctacgggtggtgtttcctttttcttttcacacaactctacGTcGTacaactcacGTactat |
| | | ccacttgctctaaagtc |
| 381 | GLuc CK dAll | gtggccacgcccgggccaccgatacttcccttcactccttcgggactgttggggaggaacacaac |
| | | agggctcccctgttttcccattccttcccccttttcccaaccccaaccgccgtatctggtggcggcaa |
| | | gacacacgggtctttccctctaaagcacaattgtgtgtgtgtcccaggtcctcctgcgtacggtgcg |
| | | ggagtgctcccacccaactgttgtaagcctgtccaacgcgtcgtcctggcaagactatgacgtcgc |
| | | atgttccgctgcggatgccgaccgggtaaccggttccccagtgtgtgtagtgcgatcttccaggtc |
| | | ctcctggttggcgttgtccagaaactgcttcaggtaagtggggtgtgcccaatccctacaaaggttg |
| | | attctttcaccaccttaggaatgctccggaggtaccccagcaacagctgggatctgaccggaggct |
| | | aattgtctacgggtggtgtttcctttttcttttcacacaactctcGTcGTacaactcacGTactaC |
| | | TcactGTctctaaagtc |
| 382 | CK SZ1-L1S | gggggtggggggggcctcggccccctcaccctcttttccggtggccacgcccgggccaccgat |
| | | acttcccttcactccttcgggactgttggggaggaacacaacagggctcccctgttttcccattcctt |
| | | cccccttttcccaaccccaaccgccgtatctggtggcggcaagacacacgggtctttccctctaaa |
| | | gcacaattgtgtgtgtgtcccaggtcctcctgcgtacggtgcgggagtgctcccacccaactgttgt |
| | | aagcctgtccaacgcgtcgtcctggcaagactatgacgtcgcatgttccgctgcggatgccgacc |
| | | gggtaaccggttccccagtgtgtgtagtgcgtcttccaggtcctcctggttggcgttgtccagaa |
| | | ctgcttcaggtaagtggggtgtgcccaatccctacaaaggttgaaccacccaggaatgccaggga |
| | | ggtaccccgcttcacagcgggatctgaccctgggctaattgtctacggtggttcttcttgcttccactt |
| | | ctttctactgttcgccacc |
| 383 | CK Aichi Scan | gggggtggggggggcctcggccccctcaccctcttttccggtggccacgcccgggccaccgat |
| | (AV-S) | acttcccttcactccttcgggactgttggggaggaacacaacagggctcccctgttttcccattcctt |
| | | cccccttttcccaaccccaaccgccgtatctggtggcggcaagacacacgggtctttccctctaaa |
| | | gcacaattgtgtgtgtgtcccaggtcctcctgcgtacggtgcgggagtgctcccacccaactgttgt |
| | | aagcctgtccaacgcgtcgtcctggcaagactatgacgtcgcatgttccgctgcggatgccgacc |
| | | gggtaaccggttccccagtgtgtgtagtgcgtcttccaggtcctcctggttggcgttgtccagaa |
| | | ctgcttcaggtaagtggggtgtgcccaatccctacaaaggttgattctttcaccaccttaggaatgct |
| | | ccggaggtaccccagcaacagctgggatctgaccggaggctaattgtctacgggtggtgtttcatt |
| | | tccaatccttttatgtcggagtc |
| 384 | CK Aichi Loop | gggggtggggggggcctcggccccctcaccctcttttccggtggccacgcccgggccaccgat |
| | (AV-L1) | acttcccttcactccttcgggactgttggggaggaacacaacagggctcccctgttttcccattcctt |
| | | cccccttttcccaaccccaaccgccgtatctggtggcggcaagacacacgggtctttccctctaaa |
| | | gcacaattgtgtgtgtgtcccaggtcctcctgcgtacggtgcgggagtgctcccacccaactgttgt |
| | | aagcctgtccaacgcgtcgtcctggcaagactatgacgtcgcatgttccgctgcggatgccgacc |
| | | gggtaaccggttccccagtgtgtgtagtgcgtcttccaggtcctcctggttggcgttgtccagaa |
| | | ctgcttcaggtaagtggggtgtgcccaatccctacaaaggttgaactgccctaggaatgccaggca |
| | | ggtaccccacctccgggtgggatctgagcctgggctaattgtctacgggtagttttcctttttcttttca |
| | | cacaactctactgctgacaactcactgactatccacttgctctcttgtgcctttctgctctggttcaagtt |
| | | ccttgattgtttttgactgcttttcactgcttttcttctcacaatccttgctcagttcaaagtc |
| 385 | CK SZ1-L2 | gggggtggggggggcctcggccccctcaccctcttttccggtggccacgcccgggccaccgat |
| | | acttcccttcactccttcgggactgttggggaggaacacaacagggctcccctgttttcccattcctt |
| | | cccccttttcccaaccccaaccgccgtatctggtggcggcaagacacacgggtctttccctctaaa |
| | | aagcctgtccaacgcctgatcccccgcggaagctgctcacgtggcaactgtggggacccagaca |
| | | ggttatcaaaggcacccggtctttccgccttcaggagtatccctgctagtgaattctagtagggctct |
| | | gcttgcgttgtccagaaactgcttcaggtaagtggggtgtgcccaatccctacaaaggttgattcttt |
| | | caccaccttaggaatgctccggaggtaccccagcaacagctgggatctgaccggaggctaattgt |
| | | ctacgggtggtgtttcctttttcttttcacacaactctactgctgacaactcactgactatccacttgctc |
| | | tcttgtgcctttctgctctggttcaagttccttgattgtttttgactgcttttcactgctttcttctcaca |
| | | atccttgctcagttcaaagtc |
| 386 | CK Aichi | gggggtggggggggcctcggccccctcaccctcttttccggtggccacgcccgggccaccgat |
| | TriLoop | acttcccttcactccttcgggactgttggggaggaacacaacagggctcccctgttttcccattcctt |
| | (AV-L2) | cccccttttcccaaccccaaccgccgtatctggtggcggcaagacacacgggtctttccctctaaa |
| | | gcacaattgtgtgtgtgtcccaggtcctcctgcgtacggtgcgggagtgctcccacccaactgttgt |
| | | aagcctgtccaacgcatgtgcctggcaagcatatctgagaaggtgttccgctgtggctgccaacct |
| | | ggtgacaggtgccccagtgtgcgtaaccttcttccgtctccggacggtgcgttgtccagaaactgct |
| | | tcaggtaagtggggtgtgcccaatccctacaaaggttgattctttcaccaccttaggaatgctccgg |
| | | aggtaccccagcaacagctgggatctgaccggaggctaattgtctacgggtggtgtttcctttttcttt |
| | | tcacacaactctactgctgacaactcactgactatccacttgctctcttgtgcctttctgctctggttcaa |
| | | gttccttgattgtttttgactgcttttcactgcttttcttctcacaatccttgctcagttcaaagtc |
| 387 | CK Scan | gggggtggggggggcctcggccccctcaccctcttttccggtggccacgcccgggccaccgat |
| | Deletion | acttcccttcactccttcgggactgttggggaggaacacaacagggctcccctgttttcccattcctt |
| | (ΔS) | cccccttttcccaaccccaaccgccgtatctggtggcggcaagacacacgggtctttccctctaaa |
| | | gcacaattgtgtgtgtgtcccaggtcctcctgcgtacggtgcgggagtgctcccacccaactgttgt |
| | | aagcctgtccaacgcgtcgtcctggcaagactatgacgtcgcatgttccgctgcggatgccgacc |
| | | gggtaaccggttccccagtgtgtgtagtgcgatcttccaggtcctcctggttggcgttgtccagaaa |
| | | ctgcttcaggtaagtggggtgtgcccaatccctacaaaggttgattctttcaccaccttaggaatgct |
| | | ccggaggtaccccagcaacagctgggatctgaccggaggctaattgtctacgggtggtg |
| 388 | CK Loop | gggggtggggggggcctcggccccctcaccctcttttccggtggccacgcccgggccaccgat |
| | Deletion | acttcccttcactccttcgggactgttggggaggaacacaacagggctcccctgttttcccattcctt |
| | (ΔL1) | cccccttttcccaaccccaaccgccgtatctggtggcggcaagacacacgggtctttccctctaaa |
| | | gcacaattgtgtgtgtgtcccaggtcctcctgcgtacggtgcgggagtgctcccacccaactgttgt |
| | | aagcctgtccaacgcgtcgtcctggcaagactatgacgtcgcatgttccgctgcggatgccgacc |
| | | gggtaaccggttccccagtgtgtgtagtgcgatcttccaggtcctcctggttggcgttgtccagaaa |
| | | ctgcttcaggtaagtggggtgtgcccaatccctacaaaggttgatttcctttttcttttcacacaactct |
| | | actgctgacaactcactgactatccacttgctctcttgtgcctttctgctctggttcaagttccttgattgt |
| | | ttttgactgcttttcactgcttttcttctcacaatccttgctcagttcaaagtc |
| 389 | CK Triloop | gggggtggggggggcctcggccccctcaccctcttttccggtggccacgcccgggccaccgat |
| | Deletion | acttcccttcactccttcgggactgttggggaggaacacaacagggctcccctgttttcccattcctt |
| | (ΔL2) | cccccttttcccaaccccaaccgccgtatctggtggcggcaagacacacgggtctttccctctaaa |
| | | gcacaattgtgtgtgtgtcccaggtcctcctgcgtacggtgcgggagtgctcccacccaactgttgt |
| | | aagcctgtccaacgcgcgttgtccagaaactgcttcaggtaagtggggtgtgcccaatccctacaa |
| | | aggttgattctttcaccaccttaggaatgctccggaggtaccccagcaacagctgggatctgaccg |
| | | gaggctaattgtctacgggtggtgtttcctttttcttttcacacaactctactgctgacaactcactgact |
| | | atccacttgctctcttgtgcctttctgctctggttcaagttccttgattgtttttgactgcttttcactgc |
| | | ttttcttctcacaatccttgctcagttcaaagtc |
| 413 | RhPV | gataaaagaacctataatcccttcgcacaccgcgtcacaccgcgctatatgctgctcattaggaatt |
| | | acggctccttttttgtggatacaatctcttgtatacgatatacttattgttaatttcattgacctttacgcaa |
| | | tcctgcgtaaatgctggtatagggtgtacttcggatttccgagcctatattggttttgaaaggaccttta |
| | | agtccctactatactacattgtactagcgtaggccacgtaggcccgtaagatattataactattttatta |
| | | tattttattcaccccccacattaatcccagaaaagctttataactataagtaagccgtgccgaaacgtt |
| | | aatcggtcgctagttgcgtaacaactgttagtttaattttccaaaaattatttttcacaatttttagttaaga |
| | | ttttagcttgccttaagcagtctttatatcttctgtatattattttaaagtttataggagcaaagttcgcttta |
| | | ctcgcaatagctattttatttattttaggaatattatcacctcgtaattatttaattataacattagcttta |
| | | tctatttata |
| 414 | Halastaviarva | cttgattctaaccttgccgtatggtgccctaacgggttcatttaatcatgcgatgagggttgctatacc |
| | (1x mut) | gcatccattctaaggcgattcaatgcttcatttaggaattagttgacgattaaaaggtacccccacaa |
| | | aaacaaaaccaatcttacttgattttcgttttaactgaccactgcgatcccaaattttcgccttcttatca |
| | | aagtatgttgtgttctttgggtgtacaacctgagaacttgtctacaactacatattactcgaggaagaa |
| | | attcggtttaagccgtgccttctcacgtttagtatatctatctGgacacaccttcttcatcttctaatccc |
| | | catctagtctcctgatcagagacgtcgttattaacaaataaccccccttgttaataagagacaaagta |
| | | caatcaagctaagttctcttggagttcctgtaggaacttagccattgtgatagagtcataagtctatgt |
| | | gcatagacagctctagctcaccatttccttcccaacccatcttttcatcagcttaactctatgaatccga |
| | | tgcaaaaaccattctaacatcttatggtgctttccaagccaaatgagagctcactcttttgagccgcta |
| | | tttaatggacaataaacgttttatagtgtacatcatattgtaaaaacaaa |
| 415 | Oscivirus | cctcggtccctctttccgtcgccgcccacgacgttaaatgcggtgttgtggtgcttaggtgccacac |
| | | cactgctatttgggtccccctttcccctatatatgtttgtttgtttatttcaatttcttgaggattggcac |
| | | ctccttatgccaaatctaaatcgtggaggatcccaggctttctggtctttaacagaactccacgtccaggt |
| | | catagaaactggttggtaggctgcctgagtagtccatttgctagtagtcccttgtgaacagggtggct |
| | | cccgtttactgctggtattcccggtgtaggtcgccatggtggtaacaccatcctgcattgtgtgtgaa |
| | | ccagtaccgcaaggatagcaaggtatgaacacttgtggacgaaatggtaagtgatcaattcactttc |
| | | atggccggaaggtcacgtggcaatcatgccacccaggtaccctcctctgggaggatctgagggt |
| | | gggctaagcagaccctgccatgtggctgaacttttcccttattgttttactttgtaacatttatagttgtgt |
| | | tagtgatttgtgtgttgtgcccttgtgagctatatccagtataagttcgcagctagaagttaatccttcg |
| | | acatcggctgtattggaa |
| 416 | Cadicivirus | caccaacccttgacctgtaatgtcagtggacagagtgctcctctgttcccggttaccgtgttccagg |
| | B | acacgattgtaatcctgcgcctcaccagcgctgcgtgcacgtctgcataaggaaacgtgccttccc |
| | | catgtctctatcaattctttggtgagtgaccgccctagttgctcatcctatgggattcttctctcatgggt |
| | | tctttgtggcatgcgaatgtcaccttaattggaggtctttaattagatatcctttcttcatctttgatatg |
| | | agtgtcggaatttgattcctagtctctgcaaaacaaccccacttgatgaattcaacttttcaaccgcacaa |
| | | acataatcaggtttttaaattgaatgtttctaaattctaaatttagtttatttaagtagtttgccatcttga |
| | | ctcgatgtaaaattgtcatacaagtcttcttttcttttctttacactttgaagtttgcacttagcagtcgttc |
| | | tgcacagctttcgagttttgtttgatcgacatcgcaacttccacccacctctctttttctagtgttgaatgcg |
| | | gctaatcctaacccgagagcaataaacccaggtttattgtcgtaacgcgcaagtcttggacggaac |
| | | cgactatacacacacctctttaccctttagtacacccttggtacg |
| 417 | PSIV (2x | gcaaaatgggtacgtagttaaccactgcgtatcaggattgcaggccacgaagggtatttgcatatct |
| | mut for | ttctatgcggtattacggcttaaaacccgttgtatcttgtTgtttgactgcctgtatcactagtggccatt |
| | XbaI) | ttatttaggttagagacccctgatagtaggagagttacaaactctttaaaaattgttgaccccggaaa |
| | | agatggtgacccctgtaagtagttgatcAagaagatctatgcgctggcatagtaatccagtgtttcc |
| | | tgttttaggatgacctctgaaagtagatgaccgtggaaagtcacgtagtgccccaataagcacgttt |
| | | gggcagcgtgcgctatcacaaggcttgatctccgaggagccccttgttttagctggctggaagcca |
| | | atgatcttaagtagataagtgctgttgcttgtagttcaacagaaagctttgagtacgtctttcttgcgag |
| | | aaagaacacatgcattcttatgctctcaattctattatttttattttgggcgaaaggaaagctctcacgc |
| | | gagtacgaatagccaaccctttat |
| 418 | PSIV IGR | GCTGACTATGTGATCTTATTAAAATTAGGTTAAATTTCGAG |
| | | GTTAAAAATAGTTTTAATATTGCTATAGTCTTAGAGGTCTT |
| | | GTATATTTATACTTACCACACAAGATGGACCGGAGCAGCCC |
| | | TCCAATATCTAGTGTACCCTCG |
| 419 | PV Mahoney | ATGAGTCTGGACATCCCTCACCGGTGACGGTGGTCCAGGCT |
| | | GCGTTGGCGGCCTACCTATGGCTAACGCCATGGGACGCTAG |
| | | TTGTGAACAAGGTGTGAAGAGCCTATTGAGCTACATAAGA |
| | | ATCCTCCGGCCCCTGAATGCGGCTAATCCCAACCTCGGAGC |
| | | AGGTGGTCACAAACCAGTGATTGGCCTGTCGTAACGCGCA |
| | | AGTCCGTGGCGGAACCGACTACTTTGGGTGTCCGTGTTTCC |
| | | TTTTATTTTATTGTGGCTGCTTATGGTGACAATCACAGATTG |
| | | TTATCATAAAGCGAATTGGATTGGCC |
| 420 | REV A | GGGGTCGCCGTCCTACACATTGTTGTGACGTGCGGCCCAGA |
| | | TTCGAATCTGTAATAAAAGCTTTTTCTTCTATATCCTCAGAT |
| | | TGGCAGTGAGAGGAGATTTTGTTCGTGGTGTTGGCTGGCCT |
| | | ACTGGGTGGGGTAGGGATCCGGACTGAATCCGTAGTATTTC |
| | | GGTACAACATTTGGGGGCTCGTCCGGGATTCCTCCCCATCG |
| | | GCAGAGGTGCCTACTGTTTCTTCGAACTCCGGCGCCGGTAA |
| | | GTAAGTACTTGATTTTGGTACCTCGCGAGGGTTTGGGAGGA |
| | | TCGGAGTGGCGGGACGCTGCCGGGAAGCTCCACCTCCGCT |
| | | CAGCAGGGGACGCCCTGGTCTGAGCTCTGTGGTATCTGATT |
| | | GTTGTTGAACCGTCTCTAAGACGGTGATACTATAAGTCGTG |
| | | GTTTGTGTGTTTGTTTGTTACCTTGTGTTTGTTCGTCACTTGT |
| | | CGACAGCGCCCTGCGAATTGGTGTACCCACACCGCGCGGCT |
| | | TGCGAATAATACTTTGGAGAGTCTTTTGCCTCCAGTGTCTTC |
| | | CGTTTGTACTCGTCCTCCTCTCCCTCTCCGGCCGGGATGGG |
| 421 | Tropivirus | tgtcgcatgttgccaacatcaaaattctgggagagtcgcgaactccttaacactgccttgcctcgac |
| | A | ggagccgttgttatagtgtcgacgggatacaaacattaaactaaacccacttgcctcgacggaacc |
| | | ccttaccttttatttttttatatagtatgaaagtgaatcttgtatgaatgttcatagaaaactgcaaatgagt |
| | | accacgtctaacatgagagaatgatactggagaaatccaagtttagaagtcactacgaatcccagc |
| | | ggaaacaagggaattctgagcttctaataggcgtttaagactatttgcaaaattctggtgcgtaagtg |
| | | atattttcattgcgtagaacgctggtaaccactccggctagtataagcattgttagtcacttattatgaa |
| | | actccacactatcctttctggagaagcacacaaacttacatggtaaagctagaccattatcttaagcg |
| | | gtgagtacactgcaaccttgtaacaatgcttgtatgactactttttgtatatcttgagcaatattgttgag |
| | | gtggacatgtccaaaggtaatgttgttgggaatggaggggtccattttcccgtgcacgtagtgtact |
| | | agtattgggtgatagccttgcggcggatcaaccatgtattttaatccgttgactttcac |
| 422 | Symapivirus | ttgggaaatccccaatgcttctttcaacaccgcctgactatgcggtggcgcttcggctcaaacaact |
| | A | agtcacttccccctcttaactactacccaagacttctaactacccttacctacttatttgtctaaatttcaa |
| | | acttttattctcacgcgtcttataaacatcttttctatttgttatggtatgttttgtgatttgtgtggtgtat |
| | | ttcatttaatgggatctagtggaccgtgccccggttgggtatccgctccctttaaatgtttgcaagcactct |
| | | tgacattataacctatcatttagtttacttgtttgtatgatcgtatttctgaatcgtaacatttatgcaattc |
| | | tttctcgccgagacttgtctaggagataaagttcctgcatatttagtgttacggttgtataatggagactta |
| | | gatagcttcacactgaggacgctttttcgctatccttttgacctgattcaggccagtgtggagttaatg |
| | | attgtatggatgggccctacaatttgtctaagacttggtgatagcctcgcggccgctcgccatttata |
| | | caactgaatagcggttgaaactctct |
| 423 | Sakobuvirus | tcacgcgcttttccggtggtcacccaccgttagggagcgccagcgttcgcgcttccgctaccaggt |
| | A | gacacactcctttcccctcccccattcccgttcccatcctctggactggtttctcctcacgattgacca |
| | FFUP1 | gcagctgggagctgttaccagacgttggacagtaagtcccggatgcactatagggctggtggcta |
| | (1x mut) | gtgcttggtaagcactcaacgccatacctaatgtgtacctcggcttgccctcctggtcgtggtgacc |
| | | ggctgtttctcttcccttggctcCagacgggctggtgtcctaccaccaccgttgcatgcagacctcc |
| | | ccctgcgcactcgaacgccctgtcccagcagggttagtatgtgctgtgcagatctgcatgtgacac |
| | | cccatccactggtagagcaggaagttgccctagctaacgcggcaagtattactttccgctacacgt |
| | | ccttgagattcctcggacctctggaactagggtgactgtgggcttgggaaaacccaccttggtcctg |
| | | tactgcctgatagggtcgcggctggccgaccagtggatgtagccagttgttttgggat |
| 424 | Rosavirus | cagggagatctccatgaataatcttttccaccctctttagcgtctatgctattgaggacgggttggag |
| | C | ccccgttgacccagcgtcagagtgtgtcggtagcaggctttctgctctcgccccatgccggccaca |
| | NFSM6F | cctcccattagtgatgtgaaggttgtaagttacatgtgaaaaggtttctaataattgagctgaatgtag |
| | | cgattacctaaggtgagcggattcccccacgtggtaacacgtgcctctcaggccaaaagccaagg |
| | | tgttaaaagcaccccttaggtaggccactaccccgtggcctcagttctcttagaagattcacttagta |
| | | gtgtgtgcactggcaactcttaagcagagctagtgagtgggctaaggatgccctgaaggtacccg |
| | | caggtaacgttaagacactgtggatctgatcaggggctcgagtgctgaagctttacagaggtagct |
| | | cgagttaaaaaacgtctatgcccctcccccacgggagtgggggacccccacaccaattttagatt |
| | | gcact |
| 425 | Rosavirus | ccaggcatggcgttaaacatgcattcccttcccctagtaacctcccttcgccccttccccacgttgta |
| | 2 | ccccctccgagatggctgctaaggcgcttgctgctacagcagtctcgtgtttcgggtgttataagtg |
| | GA7403 | ctttcttttccactccactccctgcctatggggagcggaacggccttgtctcggtcgttgcttcttgca |
| | | gatcttcacccctccaggctttctggactcgccaggggtggagtagtaggcgcactgtctaagtga |
| | | aggtagcagtgttgttggcgaagagttgtggacctactttgagtttgtagcgatcatccagagctag |
| | | cggatctccccacgcggtaacgcgtgcctctaggcccaaaaggcacggtgttcacagcacccttt |
| | | ggatggcgggggtgcccccctccgcacttaaagtagaaaaacagcttagtagtcaaataacatgg |
| | | ctttcctcaagcattcagtgctcatgggactgaaggatgcccagaaggtacccgcaggcaacga |
| | | taagctcactgtggatctgatctggggccctgggccaggtgctatacacctggttaaaaccaaatct |
| | | ggtagtcagggttaaaaaacgtctaagtcccacccccccggggacggggggttcccttaaaccct |
| | | caactgacacc |
| 426 | Rhimavirus | cgaattccggacatctcctttcgggggcgagcgtcaccgtgcccctcatggaggcaactgtgcctc |
| | A | taatcggtgacccactgagaaaattttctttctacgtggctaaacaatgcaactttataataacacaaa |
| | | tttaatgcttaatcttaacaccaaagatttgaacatatgtttggaaagtggcacacttcaaacattgcat |
| | | agttgctaggggtgaagtccctttaaggggttgcagaggatctttcctctttatgagcggctaggagt |
| | | atcttcttgatattatgtggtcgtgcaactcacttcccagatgtatgacggtgtactaagcgattggaa |
| | | ctagtcataacctctttgaattttggtattgcgagtctagcagggggatatttaccgctaaagggtgac |
| | | acactcgtgagggtggcctttggtgtgtgtatatttattccgcccatcttgcatggggtgctaaaattct |
| | | aatgctgtgaaataaccattttctgaatacattctctacatttggagtcaaatatgaggaatgccactca |
| | | ggtacccttgacatgatcttggatctgagagtgggctaattatctaattatttggcgactttctaaaatct |
| | | tctgtttttagtggtgacaatttatggttataaa |
| 427 | Rafivirus | gtgtccgggaagcgactcaagcttttgactgagtctctacaccttcatccgtaacatctttaagtttatg |
| | LPXYC222841 | tgcctatggacctctagtgcactgccatcaccgggggtgtattggactggtttttccacaatccattca |
| | | tcctgaggaattttggctttgttactaggatggtcccaccacacgcttatctgtgcctattgtgtcaacc |
| | | atgttcttaagtagttgtgcccgtgggtgagtagataaccacaacaatccgataaagcatctcgcaa |
| | | ggatgtgagtaatggagtgtatgtgctacagagacccacaacctgaaccaagagagacacagtg |
| | | aggattgtaaagggggaactctttgaaagggcatgtcccgcaattcctactgactgacaccgggg |
| | | gttggtgtcggtggattttagcaaatcctgttactgggtgatagccttgtgcacttcacttggttcttgta |
| | | taagtgctgta |
| 428 | Rafivirus | tgcgaatttattcgcacagtctcttttcccccatcttgtgtgtgtgatggggtaagccgcagagtaata |
| | WHWGGF74766 | cctactctgctgcaaacacactcactcttttctatctactttatatcatgtaataataagtagggaacata |
| | | ttcaattcatattgttcatctcactgaacccgcatgaaggactgcattgcatatcctggacgaagtgac |
| | | gtggaatatttggacatttatggattggacaccattacgctttgtgcctctacggagatgtaaccataa |
| | | tcttaagtagtagtaccccagcacaagaggataaagtggcatacacgacaacgggtgttgctcgc |
| | | accttagtaatgtggatgttcacccttggagcgtgctgaaactctgtgggtaaagacacacattagta |
| | | caaatgtgggggaactcactgaaagggcatgtcccgtgtactggtgtgccggaaagtgggggtc |
| | | gctttctggagaacttagtagttcttgttattgggtgatagccttgcggcggatcaactcacagttttaa |
| | | tccgttgttttgcat |
| 429 | Poecivirus | actacacaatcgcaacacgcgcaagtttgtagtttgattggcgtgcaaatgtcaaatcaagcatata |
| | BCCH-449 | acacaatttggtggctgttggtgtttgttataggaattttggttgtgttgaaattgtggatgtgtaggaaa |
| | | tatgcacaattacgtcagcgtcaggagttttataacctggcgcaacaccaaaatggtcttcgcgcttt |
| | | aacatcaccagcgaggtgtaaacaaattgaagttgaattagatcgtgtataggccagggaaccatc |
| | | cctcccaacgccacatcttgtggggaagttgggataatggtgggtctatatgaattggtctgtagac |
| | | ccacagtgaagagtgaatagtatgcttgcggttccatttgttaatggtctagcatgggtgggggcgg |
| | | caaccccgtgaggggttccccactggccaaaagcccaggggttagtcatttcaaccaaggaagct |
| | | ggtaacctggtgacctgaacttgagtggtgagacccccttgctagagtgtgtaaaccgattgtaagc |
| | | attttgtttgcttagtatctgtggtataagcagtcaattttgtataggctcaaggctgtggtagttagtag |
| | | atgcccggaaggttattactgatccggggaccgtgactatacattaggtaaaccggtttaaaaacc |
| 430 | Megirivirus | ttcgggacactggatgggcgacttggtggggctgccactctatcttgacctttcgttactgactttcg |
| | ALY | gatctctgactcctccttgtctcttgcgtttggtccacggacggactaattggaatgtttactggctaag |
| | | cctcgttctgaaataccctagccaatgggttgtagtaggatcctggtgtttccattaaacctcttccga |
| | | ccatagtagctagagttatggctgtgtaggatgtgggtaagaccgctttttgcgtatctcccacaaga |
| | | caccggattatggatgtgtccgctggataaggctcgaaacctcccaactgaaggtggtgctgaaat |
| | | attgcaagcctaggttgtgtagaggcaagtagatgcctgccgcgacattcgtcttccgcccttttgg |
| | | gttagtagtgtacctacatggacgtggggctgggaatccccaccttgcataacactggttgatagac |
| | | ctgcggctggtcaagttactatggtataaccagttgaaatggct |
| 431 | Megirivirus | gcttggcaacctcatatcgttactctgccgaccagtctgggtcgtgtggccacacaatgggattcgtt |
| | E | ctgttgtgtagagtcacatggcattactgggctgatcggtggggatccgttgccacccctaaaccct |
| | | tacatttactggactgcttttcttggccccggaatgattcgctcacccgcgatgaggactgttgttctta |
| | | ttatggcaggattacgcgtctggtccgcgtaaggactaattcctatgtttatacgttactaccttgttct |
| | | gaacggtgggcgccaccccgcctagtaggatcctggcttatcgtgtagacctctagggaccacatt |
| | | agctagagtgtaggctgctatggatggagtagtgacccctttttgggtatcactctctaagactccgg |
| | | aatgtgtcatagtacgctggaaatccttacttgtttttccatgagggggaggtggtgctgaaatattgc |
| | | aagccacccctcggttaaaacagtttggtgccgcttatgccatattaccgccccttgtagttgggctg |
| | | tttttgcagctccgggttagtagagtaccatagtggacgcggtgttgggaatcaccgccttggctgc |
| | | acactgcttgatagagctgcggctggtcaagctaattgtggtataaccagttgatttggcat |
| 432 | Megirivirus | ttcccgaccggtctggcaaaccggacggttatcctggttagatgtctgatggttgctggaacgtggt |
| | C | ggctactgctgccaccttctggcttcctttaatgggcatctagctgggttctttgccacaatccatctta |
| | | ctctcttacccattttctattacccagacttgttgaaactggtaaagttgacctactggcttcgttttgag |
| | | actattctggtgttggtggacactctttccacaagtagattgtatggagttcatgctcgttttgaaccgg |
| | | gaatggcacaacccgtagtaggatcttgcctctgccatactaatctgcgcctgttgcttttagactatg |
| | | ggctgctaaggatgacattggaacccctttttggatattccatgtcaagtcaactgtttcatctggtgta |
| | | cgctggaaatccttgttccgaggtcttgtctggaggtggtgctgaaatattgcaagccacaggcagt |
| | | tccttggacttggtgccgctatcagatgctacaccctctatgggcaaatgttgaaccttagtggacgc |
| | | gtgagatgggaatccacgccggccatagactggctgataagctcgcggctgatcgagttgcaaca |
| | | gtaatcagttgatttgccact |
| 433 | Ludopivirus | tagacccccacctagcccttttccccgtcagtggggggcttactcactgggcatctgttaatctggc |
| | | ctaactagattgacaccactcccttggaacgtaactccacgctaactcactggctctacgcacagac |
| | | acacggtctttctgctatccccggggaagataccagatggcgaccggctgtcccagcggcctagt |
| | | agctactcgggttgagtacccaccacggttttgacgcctgctaaaattcaagagacagaggtaggg |
| | | gtgcttagtgtgtgggggaagttcccacaagcgaggcaaagcattgctccctcgcgtcaccgggt |
| | | gcaaggtaaattggctggacttccgctctacccttgctactcgccctcttcggagggttcgaagtga |
| | | cactaggtatacgcatggttgggaaaccatgcctggcctactactgggtgatagcctggcggcgg |
| | | gtccgtctcttggcttatacccgttgatttgggat |
| 434 | Livupivirus | tatctacatggggatccaggctgtatggaatgtctgtcttaacaagcactataccagaaagatccac |
| | | ccaaagtggtgggactgggactgtgaggtgagaaatcccgaaaccagccttctcaagcgtcgga |
| | | cgatctttctgttttagtgaacaccttgccttttaaatggatgacaacaccccttcagcaaatcgcaatc |
| | | tgaaatcccaaaagactgtttagccgaactctggtaatcactccggagaagtaggatacgcagccc |
| | | ctgtggactcttgatttcaggactcaaggtagctagagctggaacttcatggaatgacaaaggaata |
| | | tatgcacattgtgcgctttcctggccttgtagcccgtcgtgaggatatgtcgttgggaatcgacatctt |
| | | agtccagtactgcttgatagagtgtcggctggcacagttacctgagaataagtcagttgtacttaaca |
| | | tgaacaaaaaaaataactaccacaactaccacaatctaccaatacttgaattatgctgaatctcgtac |
| | | agtaaaaacgttccgtggaaggacaagtattgaagtgcggttacatcatccgatacgcgctggatc |
| | | cctca |
| 435 | Aichivirus | cacccatacacccccacccccttttctgtaactcaagtatgtgtgctcgtaatcttgactcccacgga |
| | A | atggatcgatccgctggagaacaaactgctagatccacatcctccctccccttgggaggacctcgg |
| | FSS693 | tcctcccacatcctccctccagcctgacgtatcacaggctgtgtgaagcccccgcgaaagctgctc |
| | | acgtggcaattgtgggtccccccttcatcaagacaccaggtctttcctccttaaggctagccccgat |
| | | gtgtgaattcacattgggcaactagtggtgtcactgtgcgctcccaatctcggccgcggagtgctgt |
| | | tccccaagccaaacccctggcccttcactatgtgcctggcaagcatatctgagaaggtgttccgct |
| | | gtggctgccagcctggtaacaggtgccccagtgtgcgtaaccttcttccgtctccggacggtagtg |
| | | attggttaagatttggtgtaaggttcatgtgccaacgccctgtgcgggatgaaacctctactgcccta |
| | | ggaatgccaggcaggtaccccaccttcgggtgggatctgagcctgggctaattgtctacgggtag |
| | | tttcatttccaattcttttatgctggagtc |
| 436 | Aichivirus | tactccattcagcttcttcggaacctgttcggaggaattaaacgggcacccatactcccccccaccc |
| | KVGH | cccttttgtaactaagtatgtgtgctcgtgaccttgactcccacggaacggaccgatccgttggtgaa |
| | | caaacagctaggtccacatcctcctttcccctgggagggtccccgccctcccacatccccccccca |
| | | gcctgacgtgtcacaggctgtgtgaagcccccgcgaaagctgctcacgtggcaattgtgggtccc |
| | | cccttcatcaagacaccaggtctttcctccttaaggctagccccggcgtgtgaactcacgttgggca |
| | | actagtggtgtcactgtgcgctcccaatctcggccgcggagtgctgttccccaagccaaacccctg |
| | | gcccttcactatgtgcctggcaagcacacctgagaaggtgttccgctgtggctgccagcctggtaa |
| | | caggtgccccagtgtgcgtaaccttcttccgtcttcggacggtggtgattggttaagatttggtgtaa |
| | | ggttcatgtgccaacgccctgtgcgggatgaaacctctactgccctaggaatgccaggcaggtac |
| | | cccaccttcgggtgggatctgagcctgggctaattgtctacgggtggtttcatttccaattctttcatgt |
| | | cggagtc |
| 437 | Aichivirus | tactccattcagcttcttcggaacctgttcggaggaattaaacgggcacccatacacccccaccccc |
| | DV | ttttctgcaacttaagtatgtgtgctcgtaatcttgactcccacggaacggatcgatccgctggagaa |
| | | caaactgctagatccacatcctcccttcccctgggaggaccccggtcctcccacatcctcccccca |
| | | gcctgacgtaacacaggctgtgtgaagtccccgcgaaagctgctcacgtggcaattgtgggtccc |
| | | cccttcaccaagacaccaggtctttcctccttaaggctagccccgatgtgtgaattcacattgggca |
| | | actagtggtgtcactgtgcgctcccaatctcggccgcggagtgctgttccccaagccaaacccctg |
| | | gcccttcactatgtgcctggcaagcatatctgagaaggtgttccgctgtggctgccagcctggtaac |
| | | aggtgccccagtgtgcgtaaccttcttccgtctccggacggtagtgattggttaagatttggtgtaag |
| | | gttcatgtgccaacgccctgtgcgggatgaaacctctactgccctaggaatgccaggcaggtacc |
| | | ccaccttcgggtgggatctgagcctgggctaattgtctacgggtagtttcatttccaattcttttatgtc |
| | | ggagtc |
| 438 | Murine | gtaacttcaagtgtgtgtgctcgtaatcttgactcctgccggaatgccgcccggttcagtgaacaaa |
| | Kobuvirus 1 | cagctaggcaagtccctcccttcccctgtggtcggttctcaccggccaccatccctcccccagcct |
| | | gacgtgttacaggctgtgcaaagcccccgcgaaagctgctcacgtggcaattgtgggtcccccctt |
| | | tgtcaagacaccgagtctttctcccttaaggctagcccggtcccacgaacgtggaactggcaacta |
| | | gtggtgtcactacacgcctccgacctcggacgcggagtgctgttccccaagctgtaaccctgacc |
| | | caagactgtgctgcctggcaagcaccgtctgggaagatgttccgctgtggctgccaaacctggta |
| | | acaggtgccccagtgtgtgtagtcttcctccagtctccggactggcagtcttgtgtaaagatgcagt |
| | | gtaaggttcaagtgccaaatccctggaaggagtgaccctctactgccctaggaatgctgtgcaggt |
| | | acccccaacttcggttggggatctgagcacaggctaattgtctacgggtagtttcatttcccatcctct |
| | | cttttttggcatc |
| 439 | Porcine | tttgaaaagggggtgggggggcctcggccccctcaccctcttttccggtggccacccgcccggg |
| | Kobuvirus | ccaccgttactccactccactccttcgggactggtttggaggaacataacagggcttcccatccctg |
| | K-30 | tttacccttactccactcacccctccccttgaccaaccctatccacaccccactgactgactcctttgg |
| | | atcttgacctcggaatgcctacttgacctcccacttgcctctcccttttcggattgccggtggtgcctg |
| | | gcggaaaaagcacaagtgtgttgttggctaccaaactcctacccgacaaaggtgcgtgtccgcgt |
| | | gctgagtaatgggataggagatgccaataacaggctcgcccatgagtagagcatggactgcggt |
| | | gcatgtgacttcggtcaccaggggcatagcattgctcacccctgaatcaagtcatcgagatttctct |
| | | gacctctgaagtgcactgtggttgcgtggctgggaatccacgcttgaccatgtactgcttgatagag |
| | | tcgcggctggccgactcatgggttaaagtcagttgacaagacac |
| 440 | Porcine | ccaccgttacttcactccactccctcgggactggtttggaggagcataacagggcttcccatccctg |
| | Kobuvirus | ttcaccctcaataccacccaccctttccctcaaccatccctatccacaccccactgactgattcccttg |
| | XX | gattttgacctcagaacgcctacttgacctcccacttgcctttcccttctcggattgccggtggtgcct |
| | | ggcggaaaaagcacaagtgtgttgcaggctaccaaactcctacccgacaaaggtacgtgtccgc |
| | | gtgctgagtaatgggataggagatgcctacaacaggctcgcccatgagtagagcatggactgcg |
| | | gtgcatgtgacttcggtcaccacgggcatagcattgctcacccgtgaatcaagtcattgagattcct |
| | | ctgacctctgaagtgcactgtggttgcgtggctgggaatccacgcttgaccatgtactgcttgatag |
| | | agtcgcggctggccgactcatgggttaaagtcagttgataagacac |
| 441 | Caprine | gggggtggggggggcctcggccccctcaccctcttttccggtggccacgcccgggccaccgat |
| | Kobuvirus | acttcccttcactccttcgggactgttggggaggaacacaacagggctcccctgttttcccattcctt |
| | 12Q108 | cccccttttcccaaccccaaccgccgtatctggtggcggcaagacacacgggtctttccctctaaa |
| | | gcacaattgtgtgtgtgtcccaggtcctcctgcgtacggtgcgggagtgctcccacccaactgttgt |
| | | aagcctgtccaacgcgtcgtcctggcaagactatgacgtcgcatgttccgctgcggatgccgacc |
| | | gggtaaccggttccccagtgtgtgtagtgcgatcttccaggtcctcctggttggcgttgtccagaaa |
| | | ctgcttcaggtaagtggggtgtgcccaatccctacaaaggttgattctttcaccaccttaggaatgct |
| | | ccggaggtaccccagcaacagctgggatctgaccggaggctaattgtctacgggtggtgtttcctt |
| | | tttcttttcacacaactctactgctgacaactcactgactatccacttgctctcttgtgcctttctgctctg |
| | | gttcaagttccttgattgtttttgactgcttttcactgcttttcttctcacaatccttgctcagttcaaagtc |
| 442 | Rabbit | gggctataaatatgggcattcctcttcccccttccccttttgaagatgagtgcgcatattcttgactccg |
| | Kobuvirus | cctggattggccgcccaaggcgtgaacaagcagctaggccaccatgacactgcggtggtgtccg |
| | | aacccgcgggtgccttcacgggcacctgtggtatgtaggactcccaccgtggtcttccctttccccc |
| | | tcaatctttccccctggttcgactaacgggaccagtgctggaacctgtccggtgaacggtatagca |
| | | ggcccccccggcagaaacacccggtgcttaccccttaaggctagcccccacctttgaatttggttg |
| | | gggcaactagtgggtgtacagttggcgtgaaccctccggtctaggagtgctcttgcccaatcctct |
| | | gtgtgtgccttgcagtagggactggcaatccttcgcgtaggtgatccgctgtgccatgccatcctgg |
| | | cgacaggaggcccagtgtgcgcaacctacgtcccttctgggtgctgcattgcattacctttggagta |
| | | agcttggtgtgccgaaaccccagggtttacgtaccactcgtggtgtgaggaatgtgccgcaggtac |
| | | cccatccttgaggtgggatctgagcggtagctaattgtctagcaccactttcttccttttttctttgctgg |
| | | tcacg |
| 443 | Aalivirus | ttgaaagggggtgctcagggtagctccctgagctcttccctccttccctcatcaacgtctggcccac |
| | | gatacgggccacctttcaatcttaactaactatccctttaatctatttggattttctggtttagaataatttg |
| | | gaacacataattggattatcttttaggattgtggataggatttgttcgggatatcactcccttcctgtgct |
| | | aacacatattctaattccctcctttgtctattatctcttggaggtggtgctgaaatattgcaagccacttg |
| | | agtgtatagatgaagtaggctcaagatgaatgttgtgttactcaaggcaagtgtagctatcactaaga |
| | | tattggtaacgtgaaacggattaccggtagtagcgtgatcttccgtcttagtgctctagtgactagag |
| | | gacaacgacatggcatcacatatcttaaccctccagttttggcatccgggacagaatgggctggat |
| | | atccgctttctttctggggtatgtgatgggtggtattggggtaaccaccttgaccatgacgctcgata |
| | | agagtgaccgcctgatcattgaaacctctagtataaaattcaggctgaaatc |
| 444 | Grusopivirus | tgcctgagtaggattgtgaatttaggtatgagagggttagccaacccattctgaaccataatagatac |
| | A | gtcaatctgaatccatctaaatctatctcttaggcagtggtgctgaaatattgcaagctactagggata |
| | | gacgtgatctgattcaagaacctatctaatgtggtgatgagaaggctaggtttatccatagtaatccct |
| | | tgttctgaacaggcaatgcacatgctctagtaggatctcgggctctgcgattggctctaaaccgacc |
| | | aatccaggtagaggcactaagtgtaggacttgccaaaatgtattacatgctggtaccgactcactag |
| | | tctggaaactccacactgaaagtgactggggggggccccatcacatttgtgctactgcttgataga |
| | | gttgcggctggtcaacttggattggtataaccagttgaa |
| 445 | Grusopivirus | gccatccgtaggttctggtaaggttccatcaactgttggggcgctagttgctatgaccgcattcacg |
| | B | gacggatgatttatagtatcacccaatccgggcacaacttctttagccacttcttccacattactaagg |
| | | gctctcttgccgagtttcaacgtctagtccacgacacggaccttcctacttttctatcttcttattttctct |
| | | actaaattggtatctggtactgaagatatgcggattgtgattttgtgcctgtctaaactaaccctattcta |
| | | gggttaggtgggtaccatatactaatggtgaacaggattacctatgtatccattagtccctatggatct |
| | | ggcgacccacaaactcatgttcatagagaggctaagctgagtgctcgccgaataagcattgcttca |
| | | ggtgccgactattgtctggaaaccactcagtgatagctataggggggggccccgtagcatctgcct |
| | | tactgcctgatagggtggcggctggtccatgaacatgcagtaaccagttgacttgac |
| 446 | Yancheng | ccttagggtctggaatgcgtcctttctgggcacttccacaatcctaaggtaattttcaacgccagcga |
| | osbecks | tggagcgatatccaaagaacctttatgttttagttcgtcttgtatgtttataaaatataaaattgggatta |
| | grenadier | gcaacccacaaaaacatttttgttattctcaccacatgagagggtggttaaacctcttcgtaacctatc |
| | anchovy | ttgcttgattggctacttgggctagatttaggacaacctctttagcaagcctaaattactcctcgtaca |
| | picornavirus | gcacctggtaacaggcgtacctggaggttacggtggcgctaacttggacttctcgttaattcgtgca |
| | | agtttaaatgatgcctattttgaatacaagaaagtatgatagtaacttagggcgtgaagttccgcttaa |
| | | cataaggcagtataagtactaagataaggtgtaagacctaccttaataactgttgtcttttctcatggtc |
| | | tttccgtgggagcccttgctaggggtaaagttaagtattctcaaataatttttcattcaaactctttctctc |
| | | tgtttt |
| 447 | Turkey | ccactcgcacttcctggatagtgcgttagatatgcccgacatatcgcttccaggaccaaagccccc |
| | Gallivirus | cttttctctttcccaaccagcttcgccactcaagctgtaattccatgtccggtctttccggccttagtatc |
| | M176 | atggaaatgtggtcgtgctcaaatgaaattgagttgacattgatcaatgaaagttgcactgaactttg |
| | | ctaaactggctagcgccacctggtgtgtgccgttggtctcctcacatggtaacatgtgccaacggg |
| | | cccgaaaggctagtgggcaattaccgctccaagggaggggtacccaccccgacctgaacagcg |
| | | gtaatgaagctcacctcccaggctctgaccccgagaagtttagttatttagtaggtgtaattagtactt |
| | | gtgattggtcaatagatagtagatgaaacgttatggatgaatgagtagaccccctgaaggtacccc |
| | | attacatgggatctgatcagggccacattctgcgtgtctccccgcacttgtggttaaaaccatgaaa |
| | | gttcatcccaaacaatcttttcctcttctttttcttttagtggtgacaacctactggattggtgattaccaat |
| | | ctgtactagtgttgtattaagacttgttgtgtggagaaaatggactctttcaagaagatttttg |
| 448 | Falcovirus | taaaaggggacgcggtgtggcagctttggctgtcatgccgtgttctccttttaccccaaggactagc |
| | A1 | cttgggggttttccaaattcctttccctgtaggctttacttctctttatctatcttttctgtaactaagtttt |
| | | gcctattctaaaaatattttagaatgtgtttggatgtaactaagtttgtgcctgccctaaaaatattttaggg |
| | | cttgtttggataacctcgtcccttgtgttcagtgccgcacaatttgctaggcactgttcacttcctttgtttg |
| | | tccattatgtatgctaaggtatgaattccatcatatgcttagcctctacatgcataatcttattccctccct |
| | | ggtgcaaactacgcccccaacatatgtgaatcttttaagcatattcctgaccccacacatatatatgtg |
| | | ttctcgtgaattcccccaccgtgaggtggtcacttggacgtggtgtgtgtcacacagcatatatatga |
| | | tgcaggatgttgtttttaagataagcatatgtccttagtgctttgcatcatttcctccacaccccgtgaat |
| | | gcggctaatcttaaccctgttgggtccgtgggtaaaccaacccattaaccacaggacggaaccga |
| | | ctactttcgggagtgtgtgtttctttttcttcttttgtcact |
| 449 | Tremovirus | ttcaaatggcccctgggttgatacccagtggtcatttggacactttggtaaggaggtgtaattatcctt |
| | B | cccatgtggaacctagtgcttaggtttactttatatgttctttgtttgtcctttgtactttctatcgggcaat |
| | | cttgttgttcaatacaatatgtatttgaactgcctaagataaattcagttttcaaccaacccctctcttgg |
| | | ggttgtgtctttctttctttcttatatcctcttaagctgacttacttgctaatccgactcctcgtcaacggg |
| | | agggtaaagcagtatcactagggtattgtgatgtaggagaaaaagtaagtagagatagtgcatgta |
| | | acgaaagtgacttggtactttaaactctcttaatcccaaagtgtggtattggtcatgttggagtaggct |
| | | acgggtgaaactccttcacatttagtaatgtgttcacacgctaacgctacggtagatgacagactag |
| | | gtcttattctcaacgtagggggacgggtgtatgttcatgattagccacatattaaggttttgaggggct |
| | | gagtcatataagtatgtgcattaatttctggtactggtccctggggactggcccttttctaggttgatttt |
| | | agtttccccaatttttaaaaactaatgagatttacgac |
| 450 | Didelphis | tctttggtctggggaactaaaataccagacccgcgtttgcctagcgatataggctttaattgttgtttgt |
| | aurita | cattgtgcgtttgatatgtgttttaatgtaaataataattctagcaggttctagacttgatcatgtcctcttt |
| | HAV | aaggcactcatttcaacttgctatctttcttttcttccttggttctccctacaccaaatgcactggccgct |
| | | gcgcccggcggggtcaaccacatgattagcatgtggctgtaggtgttgaaggctgggacatgaac |
| | | atcaatggaatagtgcgcatgcttactggggtccattgaagtagtgggatctttctattggggtaggc |
| | | tacgggtgaaaccccttaggttaatactcatattgagagataccttggataggttaactgtgctggat |
| | | atggttgagtttaacgacaaaaagccatcaacagctgtggacagaacctcatccttagattgctcac |
| | | tatggatatgtgctctgggcgtgtttcttgcatgatggccattggtcaattcatgcctgggccaatgta |
| | | ggattagccttaaattactttttaaaagtagcctcatttagctggactaatggtggggcgtatgatcctg |
| | | catttggcctctggggtaatcaggggcatttaggtttccacataatagcaaat |
| 451 | Hepatovirus | gcaaggggtggttttaaccttgcacgcgtttaccgtgcgttaacggttttccatgtttgtatgtcttgttt |
| | G1 | gtattatgtgttttgtaaatattaattcctgcaggttcagggttctttaatcatgttgggctgtacccacac |
| | | tcaacttttggccataagtgagtttcttaacgaaccttttaacacaggatgttattagggcccaatatttt |
| | | ccctgaggccttctttggcctctattttttccccttttctatctccttgtattccgggctcacgtgatgcca |
| | | atggactgacccatgcgcccgtgggggttaactactggagtagccagtagctgtaggtgctaaaa |
| | | gtcacgtacgtgtaagactggacgagacctctcagctataactgaaagtagtaagtatgtctgaact |
| | | tcttgaaggggtaggctacgggtgaaaccccttaggttaatactcatattgagagatacctctgatag |
| | | gtgaaggtttccggtagaggtgagtttaacgacaaagcctctcaacggatgtgggcccacctcatc |
| | | agcaagatgctttcatacccaataccgtaggggctgggttgttgagacagtcccaagcgtccctcc |
| | | cgcaaggttgtaggggtactcaggggcatttaggtttccacaattaaacaaataca |
| 452 | Hepatovirus | ctttggatgcccatagtgcgggggtataaataccgcactccctttagctgttccgagggtatcggaa |
| | D | cctatatgtttgttttctgtctgtctgtcagctttatgtgtgctcgtcccctttagggcactcatttcagctt |
| | | gctttcattcttttcttccccggttctcaccttaccggaggcactggccgttgcgcccggcggggtca |
| | | acctagtgattagcactaggctgtaggtgtctaaagtggtgacattaagacttggtaactgatttcag |
| | | cactgttaactgatgttggggatgacttgattgatcttctggaaggggtaggctacgggtgaaaccc |
| | | cttatcttaataccactatgtagagatagattcagtaggttaagggcagtggataaggttgagttcattt |
| | | tggacaataaaccttcaacactggtggacccaatctcactgaccagatgctttcttgactgatccttc |
| | | agaggggtgattcttctgaataggttgccttgacactgatgcctgagacccattgggtcgggcctta |
| | | aatcatggaactccactggactttcatggcctagcttctgccttagacagactctggggccccacga |
| | | ccctctgggcccttcggggtactcaggggcatttaggtttttccacaattaaaagagtta |
| 453 | Hepatovirus | gtcatgtttctctttaagaacactcaattttggccataagtgagactcttgtcgaacctttcatgtcagg |
| | H2 | accatgttagggccattatccttttccctggggcattcttcttgcccctgtttcatctttctatcatcttt |
| | | cttccgggctctcacaatgccaatggagcgaccgatgcgcacgtcggggttaacccatggattagcc |
| | | atgggctgtagctgctaaaagttgtgactcctgaagcatactatcaatggtagtagatgtaactgaaa |
| | | cactgaagcttctctgatcttgaaagaagggtaggctacgggtgaaacccttcaggttaatactcat |
| | | attgagagatacctttggtaggttaacgttggcggataatgttgagtttaacgacaataaacattcaac |
| | | gcctgtgggcgaacctcaccaatttcatgctttgaagtgaatgtgcgtagggtctctatcggagatg |
| | | ctatgtggatggtgccctccctggaaacaggttgtaggggtactcaggtgcacttaggtttccacatt |
| | | ttaaagatttttc |
| 454 | Hepatovirus | ggctgcctgtgtctcaggggtaagtactggggccgcgttgaccgtgcggtacggttatgcttttaga |
| | I | ttaggatgtccgtctgtccggcactctcttttgcttaaaatggccttaaatccatgggaggcgtaacca |
| | | tgggccctttgttacctagacatgattgcattgggggccgtccttggggcttaggccccagccatttc |
| | | tcttgactcgtctaagagtttacttcatccttttctttactttattttccaggctctcagcatgccgacggct |
| | | ctgaccactgcgcccggtggggttaactgcatgattagcatgcagctgtaggagttaaaagtgctg |
| | | acaggccaattctgacgtaagtccactctatattaacttgatcaagtaaggttgattgatctttgtgaga |
| | | gggtaggctacgggtgaaaccctctaggttaatactcatattgagagatacctccagaaggtgaag |
| | | gttggcggatattggtgagttcttttaggacaaaaacctttcaacgcctgtgggcccacctcactggc |
| | | acaatgctttcatccccaattgtgatgggtagtttggactgaaatcaggagtaacctgccctacgagt |
| | | ttaggggtagttcaggggtatttaggcttccacatttgatagagtttatgagagtgagcc |
| 455 | Hepatovirus | ttcaaaagccccagcggggtttcattaccccgctgtggcttttggacttccctaggatggggaagta |
| | C | aattaccatcctcgcgtttgccgtgcgttaacggctacttttcttctagctgtagaagtaaaattcagca |
| | | tgttttatgtttgtttgtcttgtttgttatatacttttatacactcctacaaatgcacatgaagaacagttt |
| | | gtagagattaacaaacgcttagctgaacctaggtggtgaatctagtagtaagataagtagaggaagct |
| | | ataccttaagttggttgggccctcgtgtttgctctataaacaaaaccaagtgagtagagtggatgaac |
| | | agtactaaatccctgagtacagggaacctcacaggtgtgatacacttatgtctatgtgacctggttgg |
| | | aggttgggcgtgccctatgatactggagtgggagatcttttggggaacccacgttttcacactgcct |
| | | gatagggtcttgccgagagactcacttgtttcggctgtacttgtaac |
| 456 | Fipivirus | tgcgggtaaactcccgcatgtgtgaatgaggcgatgtcccaggaactaactgccgatcctggtttta |
| | A | actacgatccgtatttgttactaatgcgatatccccccattgtttgcctccatgttgttttcaacgcttttg |
| | | gccttgagtgttatcaagtgttttagcgacatagtgggaagctacggctgcgtccccatttttgagtg |
| | | gcgacccagttttagtggccactctgtccctgaactgcgctataatgtgaatttatgttcacaaaaac |
| | | ggactgatgtaactgttaatgactaaggaatagtacctcactgaagtatcaagaccccgttcgagcg |
| | | gtgtacatatatggatggaaaccagtctgagtcatctcgaatactaatcaatgagggatgtcgagta |
| | | agcatatcatgaaccacatagaatagtggggtttcggggttagaggctctctgcagcaatgtatctct |
| | | aacaccatggccgaaatgagagatagagaccacgatgtttgtgtgtaagtaatgatgtgtggaaag |
| | | aaaattctgaatgttggtatgatatcagtctaaggggagtggctcacctaagagctacccaaacattt |
| | | cacagcagacaacataacgtactgagagtagttggaaggttccagaaatcagt |
| 457 | Fipivirus | cgcggttaaacccgcgccaaccttctttcagccgcgtctgagtagcgcggttagtcctgatacacagt |
| | C | ttcctgttgggtactgtgtcttcgggtgaatgctcttgtgtgaatgttttaggctgtttaagggaagcgtt |
| | | tccccgtgcgctgtgagggtttctcacgctctttcggggtgcagtctcttctgttgttcattaagatgta |
| | | tggatgcactgttgtgaaggatttgtgaactggggatcgacaccccgtgaggggtgccccagtgtc |
| | | cataggagtttgctggagaggtgtgttgctgtagtgactatccgtgacctggcattctaaggtgttga |
| | | ccccaacctgtgagggtctggatcgcagtgttgaagtgctttggagggttcaatggggtttctgtagt |
| | | ggatattatgtgcttgacgactactggtacgagtgtattgggggtctacatgtgtga |
| 458 | Fipivirus | ctcttccgatcttgggggttcgcccccatgtctcatttcaactagccgtgtgtctagttaacgcaccgc |
| | E | ctcaccctggtcgttatcgggtcggttcttgcgaccgttagatcgtgagcgtttctgaggatcagttc |
| | | gtataagttctccggtgtggcgaccgtaaaatcgtcacgtcccatgcaatagatgacgttaaactcg |
| | | tttgccagttacataaaggaatgttgttacttttaaattgtctgttacatttaacatcttgccagtatgatg |
| | | ctactgtacactacgggtgtaggaaccttgtagtgtgacgtatcactcatatgtggatgggtgctcca |
| | | gacctttatggaagctctcagttagtagtgatccttgacttcattgagccctggtaacagtggaagtc |
| | | aagatgtatatgttgctcaacacacttcggtgctacgaagctgtttgtggaagtactggcgaggttca |
| | | ttctgaatcatatgtttgtcacatagtcagggagtgccgtcgcttacgacggaccctttttctttataatt |
| | | acaaatctgtgtctcaagtgttgttggctggttttcttcttctgttttcattgttcatatatatacgtcaga |
| | | gtgaaagactcggtatatacaaaactgatccaga |
| 459 | Aquamavirus | ttcaaaggtggcgggagagttggcctcacgctgtttagcgtgagagctggctctcctgccccttcc |
| | | cctgagccggggatcttggctcattcccctcttttctatcctccctcattggactttacggatgacccg |
| | | gcataaacttgacaaccgatgttggatttcccttgtggctgtgatggaggacataccctcgggtgta |
| | | gttgtgtgcgtgtcgctctgcgactcgagcttcaaagtggtgctgaaatattgcaagcgtcgttgctc |
| | | gattaacggagtggtacaatcctatgaacccaagtgcattcatgcgaaagccccggaggggtgag |
| | | tagcatggactcgaatcagaagagctggagctcgcttggtacggcacgtagcattgctttgcctaa |
| | | agaccaagggggtatggctataggtgggggcctatagcttgtccagtgctggttgacagactcgtg |
| | | ctacgcgtctggttcgagtataagtagctgcaactcact |
| 460 | Avisivirus | ttcactcgctttccccccctctctataggggcggtcttttaattcttattaatttcctactttactatcaaa |
| | A | tttcttctaagtagggactgaggtcacttagccctccctctcctgggctttccagggttatagaggttcta |
| | | aagctaagccatgtgtcttgagctacacttagtacaaaggtttagtaatgattgtacatgccagtaac |
| | | cttctagtgcccatggattaaagagtggtaacactctccatggggcccgaaaggctagtgggcata |
| | | gttggcatcaaggaaggggtccccaccccaacctgaattgctggctagaagctcaccttagaaga |
| | | agtgctgggtgacaacgtgtccaatcgtgaacgactgatggaaacgtgtggagatggatatgtgg |
| | | gggttcactgagtagatgccctgaaggagaaatctgatcaggggcccgtgactatacgctaggta |
| | | aaccgggtataaaaaccatgaaaggtggcccaaaatcttttccttttattttatttctatgttggtgaca |
| | | gtcaag |
| 461 | Avisivirus | caccccctactgccctaacccccaaagttagttatagggtggctccctacccttactccacggggta |
| | B | agccctaacccggttgaatctcaagatcagccttagcgaggactattagtaccgctcaaaccctttg |
| | | cctgtagtgcccaggggtcacagaggggtgaccctctccctggggcccaaaaggctaggtggca |
| | | agacagggtccaagtgaggggctactctaagtagccccaagctgaacatcctgtctgaagccacc |
| | | cttgcagggccaggtttgattggggaaactagacaccagctttgtcctgggattggggggatatcg |
| | | agttagtccaggaggtgcgagtagatgcccccgaaggtaccccaggcacatctgggatctgatcg |
| | | ggggcccgtgactatacaataggtaaaccgggttaaaaaacatgaaagcgcctctctctttcctact |
| | | tcttttattgactggtgacaaaaatagcagt |
| 462 | Crohivirus | gttgaagtccatttcttgcttgcccccgatgaatcctgttaaggcctcacggccctaagggtgaaact |
| | A | cggttatcccctcctgtacttcgagaagattagtacaacactatgaaatctacatcttgtgatccggga |
| | | taaccccaatcccagaaacctgtgatgggcgtcaccacccctcttatggtaacataagggtgtcgc |
| | | cgcgttggcacaggaccctttgggctggatgtttttagtaatggtgtcgaaggtcctattgagctaca |
| | | ggagtttcctccgccctggtgaatgcggctaatcttatccctgagcctaaggttgcgatccagcaac |
| | | ttgatggtcgtaatgcgtaagttgggggcggaaccgactactttccagaaggcgtgtttctttgttttg |
| | | tctgttactatggtgcatgatatagatattgaatatttgatctttttgagctgtttcttatcttattgcta |
| | | catcctttcaggtgttggatttacattttggttaataag |
| 463 | Kunsagivirus | gattttctggttatcccttttggacttggtaggggcccacgtgcccacccacctctgtgtgtgttgattt |
| | B | ctaatcgatgcctggcagtggcggccacctctccttactggtaaacctccggtgagtgaagttgtca |
| | | agctacaggtaccgtgcaggatgaaatgcgcacatgtgaacaaactaggagtcatacaccgggtc |
| | | aaactctggaaacggagtccgggactctgaccaggagggtgagctcgaggcatcacattgatgg |
| | | acgcgattcgctatccttccctagtaggaccttgtggtgtacccctggttgggaatccagggctggt |
| | | cgggtgcagggtgacagcctgttctccacctcaaccattgtaggagaaatcaacccct |
| 464 | Limnipivirus | ttctttggatatccatttaacgtgtaccctatacgataattggggtggattctggatgcctagttccagt |
| | A | gattggttaagaactcgtttactacgtatagtatgattagcaaagtgctcgattgatcacgtaatgatct |
| | | atgtggttaaaaacccagtagtatggtatatactcagtagtgtacactgtgagtacaactcttggcgta |
| | | gagagaacaattcacccgaatccgtggcgtatccatggaaataagtttacctaattgtatgttacaag |
| | | gcatatgagacatttatgagatatggtttattttgactaaacgagtgtagaggtggtggagtctatcca |
| | | acttcaagccatgcaattgttgtgttgattgatatcattgaccatttttgtggattgtgtacacatacaatt |
| | | tgaaaattaaccccctcaagaataagacatgggaccattcgtggtagataccgtgctcggatgcttg |
| | | agattagatgggttagactagttttggaatgagattgccgagaaagtcccgctagacatgttttacaa |
| | | gtcgtggtattccgctagactttttcgcagacacatggaagggtccatgtgttgtgcaattgcagggt |
| | | gacagcccaactgcagagttttccttactagaataaaaatctgttgtcaatttt |
| 465 | Limnipivirus | gtttctgagcactggtaagagcttagacaaacgtttttaaaatttattttctctgcaacttttgtttgtg |
| | C | tttatttttatttgttaattttgcgcctaagcatttgttgcgaagtatttgattcattagtaatattact |
| | | tattgtttatttagatggtattcaaagtggtgggagtatcgaacccaagcgtcgtatgctatctccttga |
| | | acaatttttaatcattgcgaagtgatcattgaaaaggataggtgtttaagaactcaaagagtgttaataa |
| | | tgttgggtgacaggtgtccccatagaatttattaacatgtttaggactggttatctagtaagaagaacca |
| | | tcgaacgcacgagcgagcattgcttgcggggcagttaccctgcgtcgatgtaagtgtgtaccggggggtg |
| | | cacatgttgattctttatggcctgatagggtgcgtcattcgcgcctagataattagtataatgcgaatg |
| | | gaataaatttac |
| 466 | Orivirus | ggtcccaggccaatattcttcgtaaggcttggttccaattttccaccactcgtgtttgggttctggccta |
| | | tggtacccagaggggcggtttgggggaattaactccccctcccctgtggtcctataccaccccaca |
| | | cctctgtgggctttctttactatcttcttgttttccgacttttaaacactaggcaggcgcgcctagtcata |
| | | caccgcccggctggtctttccagcttttgtgggcggtgcgcgctggtccatcgtgcccagcgacat |
| | | agcaccttgtggacacctccgaacgccctcccctgtatggggtggtgcccaggggtttcagtgtgg |
| | | tgacacactccctggggcccgaaaggctagtgtgcaacaggtgaggtacagccagctgcccccg |
| | | tggctggagggaccaagcttgtgaagcacacctcaccacttgggggtgggctagtaagtggtga |
| | | aagcatagtgtccgtgtcgctggccaacactttgggtcaagtccagccactcagtgagtagatgcc |
| | | caggaggtacccctagtggatctgacttggggcctgttacttaatgcaggttaaaaactatgaaagc |
| | | tgagtagtgtagcccggctggtggcttctcttccttattcattctattttatggtgacaaacgcaactga |
| | | agcc |
| 467 | HAV FH1 | cttgatacctcaccgccgtttgcctaggctataggctaaatttccctttccctgtcctttccctatttcctt |
| | | ttgttttgtttgtaaatattaattcctgcaggttcagggttctttaatctgtttctctataagaacactcaa |
| | | ttttcacgctttctgtctcctttcttccagggctctccccttgccctaggctctggccgttgcgcccggcg |
| | | gggtcaactccatgattagcatggagctgtaggagtctaaattggggacgcagatgtttgggacgt |
| | | cgccttgcagtgttaacttggctttcatgaacctctttgatcttccacaaggggtaggctacgggtga |
| | | aacctcttaggctaatacttctatgaagagatgccttggatagggtaacagcggcggatattggtga |
| | | gttgttaagacaaaaaccattcaacgccgaaggactggctctcatccagtggatgcattgagggaa |
| | | ttgattgtcagggctgtctctaggtttaatctcagacctctctgtgcttagggcaaacactatttggcct |
| | | taaatgggatcctgtgagagggggtccctccattgacagctggactgactttggggccttatgtggt |
| | | gtttgcctctgaggtactcaggggcatttaggtttttcctcattcttaaacaata |
| 468 | HAV HM175 | cgccgtttgcctaggctataggctaaattttccctttcccttttccctttcctattccctttgcttgcttgta |
| | | aatattgatttgtaaatattgattcctgcaggttcagggttcttaaatctgtttctctataagaacactcatt |
| | | tcacgctttctgtcttctttcttccagggctctccccttgccctaggctctggccgttgcgcccggcgg |
| | | ggtcaactccatgattagcatggagctgtaggagtctaaattggggacacagatgtttggaacgtca |
| | | ccttgcagtgttaacttggctttcatgaatctctttgatcttccacaaggggtaggctacgggtgaaac |
| | | ctcttaggctaatacttctatgaagagatgccttggatagggtaacagcggcggatattggtgagttg |
| | | ttaagacaaaaaccattcaacgccggaggactgactctcatccagtggatgcattgagtggattga |
| | | ctgtcggggctgtctttaggcttaattccagacctctctgtgcttggggcaaacatcatttggccttaa |
| | | atgggattctgtgagaggggatccctccattgccagctggactgttctttggggccttatgtggtgttt |
| | | gccgctgaggtactcaggggcatttaggtttttcctcattcttaaataata |
| 469 | Parechovirus | ggtcggggagatgtgttcatgatcggttaacaccatcatggatcatctctccccgacctctttttgacc |
| | F | cagctatgggttaaatagtacttttcttttctcttttgctttcttttgtgtttgtttgattgcaacatataa |
| | | caagcattttatcagtattagtgtctgcaactgtataacaagcaaggtggagcaatcatgcgagtatatct |
| | | caattgaattgtgacacacaagtgtgcactatgtggaataaatgccattttggccaaacctggttagc |
| | | cagaccagtagtaggacaatttggcacccttagtgggcgcgacctagatgctagggatgagcaaa |
| | | cctatttcccctgagtacaggggctctccttcacctctacttttaggacctctttttgagtatcctcgata |
| | | gaaggtgaagtgacggtgtaccggatggttaattgatctcattgctgggtgacagcccgctaggac |
| | | caggcagcatctttgtatggacctgtacatgtaac |
| 470 | Parechovirus | acatggggcaggtgtgctgtgccaagagcaacactacggtggccgagccgatggttcgtcacca |
| | D | cgtagtaggactccgtagtgcttggttacggcggacgtaagtcagttgagtgatgtctaagtggcaa |
| | | accatgagtacatggtaaccttgtgtggactcgcgggacggaatttcctatcccattgactccttgta |
| | | gcaaggtgggtatacccaaccacaatggcagcaccctgggtgggaacccaggggcctggatta |
| | | gtatccagtcacacagcctgatagggtggcggctcagccactgaccagcgtctctaaataattgtg |
| | | agctgttcatgcacc |
| 471 | Parechovirus | cggtcatccccctttccccacagccggtgtgggttctaatcggctcctactaaacacctaagcatca |
| | C | ctgcgcctctatctctcctatccacaggtctaagacgcttggaataagacatgtgggtgcaatagga |
| | | agattagctagtccaatctctccttccagctacgcttctcccttcgatgagcgtagggggggccccc |
| | | acctccctcatctctggatagggctcttgctacggggctttcccgtctggaccagcaggcccactg |
| | | gtgcgcttccattcaagtttagtgtgcattactgtctgaaatattgctttgctaggatctagtgtagcga |
| | | cctgcatattgccagcggacttccccacatggtaacatgtgcctctgggcccaaaaggcatgtcttt |
| | | gaccgtatgcagtacaaccccagtataggtcctttctatggcagtatggatctcagtgatgagtctat |
| | | acagaatatggaagtggttcggatatgtcagcccgaaggatgcccagaaggtacccgcagataa |
| | | ccttaagagactgtggatctgatctggggcccaccaccttcgggtgggtagaagctaaccatgcct |
| | | tgggttaaaaaacgtctaagggctgaccagacccgggggatccgggttttccctatcttgacctact |
| | | ctaatc |
| 472 | Ljungan | ctcattgcccacacctggttggttcccaggttcatacaataaccatcaataaacttttaacatctaagat |
| | Virus | agtattatcccatactagactggacgaagccgcttggaataagtctagtcttatcttgtatgtgtcctg |
| | 87-012 | cactgaacttgtttctgtctctggagtgctctacacttcagtaggggctgtacccgggcggtcccact |
| | | cttcacaggaatctgcacaggtggctttcacctctggacagtgcattccacacccgctccacggta |
| | | gaagatgatgtgtgtctttgcttgtgaaaagcttgtgaaaatcgtgtgtaggcgtagcggctacttga |
| | | gtgccagcggattacccctagtggtaacactagcctctgggcccaaaaggcatgtcatttgaccac |
| | | tcaggtacacaaccccagtgatgcacacgcttagtaatggcttagtaacaaacattgattgatcattt |
| | | gaaagctgttaggaggtttaggtatgacgggctgaaggatgccctgaaggtacccataggtaacct |
| | | taagcgactatggatctgatcaggggcccaccatgtaacacatgggtagaagtcttcggaccttgg |
| | | gttaaaaaacgtctaggcccgccccccacagggatgtggggtttcccttataaccccaatattgtat |
| | | a |
| 473 | Parechovirus | gccgtcgggccttacaccccgacttgctgagtttctctaggagagtccctttcccagccagaggtg |
| | A2 | gctggtcaaacaataccaaacgtaactaaacatctaagataacatagccctatgcctggtctccacc |
| | | agttgaaggcatcttgcaataaaatgggtggattaagacgcttaaagcatggagtcaattatcttttct |
| | | aactagtgatcttcactgggtggcagatggcgtgccataactctattagtgggataccacgctcgtg |
| | | gatcttatgcccacacagccatcctctagtaagtttgcaaggtgtctgatgaggcgtgggaacttatt |
| | | ggaaataattacttgctgcgaagcatcctactgccagcggatcaacacctggtaacaggtgcccct |
| | | ggggccaaaagccacggtttaacagaccctttaggattggttaaaacctgagtaattatggaagata |
| | | cttagtacctaccaacttggtaacagtgcaaacactagttgtaaggcccacgaaggatgcccagaa |
| | | ggtacccgcaggtaacaagagacactgtggatctgatctggggccacctacctctatcctggtgag |
| | | gtggttaaaaaacgtctagtgggccaaacccaggggggatccctggtttccttattttagtgtaaatg |
| | | tcatt |
| 474 | Parechovirus | agagtccttttcccagccagaggtggctggttaaataatacctactgtaacaaaacatctaagatgta |
| | A3 | acaaccacacacctggtctccactggccgaaggcaactagcaataaggcaggtgggttcagacg |
| | | cttaaagtgtgttgtacatattcttttctaacctgtgttttacacagggtggcagatggcgtgccataac |
| | | tctaacagtgagataccacgcttgtggaccttatgctcacacagccatcctctagtaagtttgtaagat |
| | | gtctgatgacgtgtgggaacctgttggagataacagtttgctgcaaagcatcccactgccagcgga |
| | | tctacatctggtaacagatgcctctggggccaaaagccaaggtttaacagaccctttgggattggtt |
| | | caaacctgaactgttatggaagacatttagtacctgctgatttggtagtaatgcaaacactagttgtaa |
| | | ggcccacgaaggatgcccagaaggtacccgtaggtaacaagtggcactatggatctgatctggg |
| | | gccagctacctctatcttggtgagttggttaaaaaacgtctagtgggccaaacccaggggggatcc |
| | | tggtttctttttaatttaagtaatcact |
| 475 | Parechovirus | gggccttataccccgacttgctgagtttctctaggagagtccctttcccagccctgaggcggctgga |
| | A8 | taataaaggcctcacatgtaacaaacatctaagacaaaataatttgccttgcacctggtccccactag |
| | | ttgaaggcatctagcaataagatgagtggaacaaggacgcttaaagtgcaatgatagttatcttttct |
| | | aacccactatttatagtggggtggtggatggcgcaccataattctaatagtgagataccacgcttgtg |
| | | gaccttatgctcacacagccatcctctagtaagtttgtgagacgtctggtgacgtgtgggaacttact |
| | | ggaaacaatgctttgccgtaaggctttcattagccagcggaccaccacctggtaacaggtgcctct |
| | | ggggccaaaagccaaggtttaatagaccctaatggaatggttcaaacctggagcattgtggaaagt |
| | | acttagtacctgctgatctggtagtaatgcaaacactagttgtacggcccacgaaggatgcccaga |
| | | aggtacccgtaggtaacaagtgacactatggatctgatctggggccaactacctctatcttggtgag |
| | | aggttaaaaaacgtctagtgggccaaacccaggggggatccctggtttccttttattttactttgtcaa |
| | | t |
| 476 | Parechovirus | ctctattagtgagataccacgcttgtggaccttatgctcacacagccatcctctagtaagtttgtaaga |
| | A17 | cgtctggtgacgtgtgggaacttgtgggaatcaatattttgctttaaagcatccattagccagcggat |
| | | aaaacacctggtaacaggtgcctctggggccaaaagccaaggtttaacagaccctagtggattgg |
| | | tttcaaaacctgaaatattgtggaacacactcagtacctactgatctggtagtaatgcaagcactagtt |
| | | gtaaggcccacgaaggatgcccagaaggtacctgtagggaacaagagacactatagatctgatct |
| | | ggggctggctacctctattttggtgagtcagttaaaaaacgtctagtgggccaaacccagggggga |
| | | ccctggtttccatttattttacaaaggcact |
| 477 | Potamipivirus | cacatggaaagcttttcgcttccatgtttacgcacacactctctttgacaccctgttgtatggtgttaaa |
| | A | ctacaacatttgtctgtctataatcgtttattttgtttaccctatatgtacccaagtatttgattgcttgac |
| | | tcacataagcatcggtaacccatactgttttatgagctactacctctgctgtctacatacattttatatgaat |
| | | ggtttgagctctgcctcaggatcaaacatggtaacatgttcctttggtcagttagaatcttattgtataat |
| | | ctaaggtgtctattagtacgtagaaagttgtaacacatatggggcctgatagccgctatctctgatgg |
| | | atgtaaggtaaccttctttaggtctgatacattctgcacaggatccaattttcggtgccctgtacgagt |
| | | gcactcttatgcacgaggacgagatatgctacaacccactgcaaatttaaacccaaactttaaca |
| 478 | Potamipivirus | tttcaacgtcgtggctgacgttaaaaagccacaattccacttaccttttaccttttatgtttaatgtttgtta |
| | B | gttttgtgatctttaacaaatagatctaaataatttgttggtaaccaatctcggatgtttcggctgcattgt |
| | | agtttatttatttcattttagttgtaggtggccactacgtcctggaatcatacatggtaacatgtacctcg |
| | | gcggttatccactattacgctaatctaagaatatttaaatgaaaatgtaagtgttacggctgactttgg |
| | | gcctgatagttaaatgctcgcactgacagatagtaccctcctttaggatcgattctgttacatgggatc |
| | | cattttggtgccccactgattcaacctctttgagaaaaagagttagcatactacaaattttccaaacaa |
| | | aaaccctttttaatgactacaacttatgatattttgaattttactgctcttgaaaaagatattttgacattga |
| | | tcgctgtactgtttcagacattcattgcatccatttttgttggctactcctcacaaactcaaaacttttcca |
| | | cacgagaaaccttgtttattgaattttgcctttatttttaggaacttgttgttggatttattgtttgcttaat |
| | | tattgacctcacacctgttttaaacactacaat |
| 479 | Beihai | gggacaaccccacagctggtacaaccattgtgggttggtctccaccctttttcaaccgtggcaactt |
| | Conger | cggttaaagttgcaaatcccccctctccctattccacctcccttactacactccccatatatggtccca |
| | Picornavirus | gattttattctacctctttatatttttatttagtacagtggtggtgaattactcccagcataaactttgctgg |
| | | atcagtgttcatcaagcatactaattactaatgtactgagctatactattatctggcatctcacctggat |
| | | aaccggtgtgaccatatttcctaggttgcctccctatgtattttgtagcacctgtgcatctgcacgttgg |
| | | ggcgacaaattgtaggtttcctggcacgggtaagaattgtggaaagctagtatgcagttaatgcaa |
| | | gggcgcgtttttcgctaccccgacactgctaaagtttttgggaggggtcccttaaacatttctagtatt |
| | | gagtgatagctttgcggcaggtcaccacaaccttactataaataaacctgttgaatctcac |
| 480 | Porcine | tacgcatgtattccacactcatttcccccctccacccttaaggtggttgtatccccataccttaccctcc |
| | Sapelovirus | cttccacaatggacggacaaatggatttgacctcacggcaaacacatatggtatgatttcggataca |
| | JD2011 | ccttaacggcagtagcgtggcgagctatggaaaaatcgcaattgtcgatagccatgttagtgacgc |
| | | gcttcggcgtgctcctttggtgattcggcgactggttacaggagagtaggcagtgagctatgggca |
| | | aacctctacagtattacttagagggaatgtgcaattgagacttgacgagcgtctcctcggagatgtg |
| | | gcgcatgctcttggcattaccatagtgagcttccaggttgggaaacctggactgggcctatactacc |
| | | tgatagggtcgcggctggccgcctgtaactagtatagtcagttgaaaccccccc |
| 481 | Porcine | ttgaaatgggtgtggggtacatgcgtattacggtacgcatatattccacactcatttccccccctcca |
| | Sapelovirus | cccttaaggtggttgtatccccataccttaccctcccttctaaaacagatggacaaatggatttgaact |
| | A2 | tatggcaagtgaatatggtatgactttggatacactttaacggcagtagcgtggcgagctatggaaa |
| | | aatcgcaattgtcgatagccatgttagtgacgcgcttcggcgtgctcctttggtgattcggcgactgg |
| | | ttacaggagagtaggcagtgagctatgggcaaacctctacagtattacttagagggaatgtgcaatt |
| | | gagacttgacgagcgtctcttagagatgtggcgcatgctcttggcattaccatagtgagcttccagg |
| | | ttgggaaacctggactgggcctatactacctgatagggtcgcggctggccgcctgtaactagtata |
| | | gtcagttgaaacccccc |
| 482 | Simian | ccaaggatctgttgcataggcgttgtatcccctaaccttttacctacccatcccaataggactggtatt |
| | Sapelovirus | tcggttttgattgagtaatggatactgattctatacctgttacccattcaggggaaaaatggagtttcttt |
| | 1 | catggatctgacttgatatgaccaagagtcaacactttgcgtgttggccgtatggaatgctttaaggtt |
| | | tattctttggattatgacttcagggttggccgcccaggataaaaggcaattgtggtaagtgatgttagt |
| | | cattggtggttgaaacctgcctaagacgtcctaggtctacgctgtgcgggccgaagtaagcttagg |
| | | aataacagggagtatgccattttctgctttcacccaacacgaccgtacacgaaagagctagaggca |
| | | ctttggggcaaagggaaaagctttgcttagcccgaatgttcatttgagtccttgacgaatgcgtccc |
| | | gtctgtcccgacggtgaggcgtatggcgcatgctcatggcattacccaatggtgtatctgtgaggg |
| | | gggggctcctcacacttagtctagtgctacctgacagggccgcggctggtcgtttgtgtatggtata |
| | | accagtagtaatcccccatggattgctttaacttcccctcctcccttaccaagacattctctaag |
| 483 | Simian | ttttaacttgttatgacattcaaggaaaaaatgtctttttcattatgggactgacctgtttatgaacatgag |
| | Sapelovirus | cagcggcactgctccacgggctatccgtgtaagaaatattgattattcttatggatcatgatttcagg |
| | 2 | gttggccgcccagtctaaaaggcaattgtggtaagctatgtaagtagttggctgttgaaaggagcc |
| | | aagtacatcctaggtctacgctgtgcgggccgaagtaagacttggaacaactctgagtaggcagtt |
| | | tttctctttagcccaacacgaccgcatactgaagagctagaggcactttggggcaaaggtaaaagc |
| | | attgcttagaccgaatgttcaatgagaccttgacgagtgctgtcacagtgtcccctgatggcagtatg |
| | | gcgcatgctcttggcattacccatatgtgtatctatagggggggggccccctatacttagtctagtgc |
| | | tacctgacagggccgcggctggtcgtcggtgtgtggtataaccagtagtaatcccccatggattgc |
| | | tttaactccccctcctccctcaacaaaactttctctaag |
| 484 | Rabovirus | ccgggtataacccggagttttggggcaggtccaagccccacataggaacatacgatccacggatc |
| | C | gtgtgttcttttatgctttctaaccttaccctttgtaaccattacgctttacgccgcatggtgtttggcggc |
| | | accatgacgtggacaagaggttacgccattacgatatgtaccctccctttaggggagagaccgac |
| | | caattatggtacagtatccaactgtattgtggtcaagtttcactgtttccccggtgatgcgggataggc |
| | | tgtacccacggccaaaacctgctgatccgttacccgactcacatctacgaggaggctagtaaaag |
| | | gcatgaagttcaagagtatgatccaaccagatccccactggtaaactagtgatgagggttcccgac |
| | | cgaacatggcaacatgtgggttccctgcgttggcactaggccccttccgaggggtgctctgaagat |
| | | ggattgttgatgaagaccaatttgtgcatgtgtttatcctccggccctctga |
| 485 | Rabovirus | ccgaccccactggtcgaaggccacttggcaataagactggtggaacaaggtcgcctgtagttgatt |
| | A | ggaaccttctttctaatgacttatgtcagcggtgctactcacaccgtaactctcctaccctatccccac |
| | NYC-B10 | gcttgtggaactaggaggggatgagtgattcaagtaagtactgtcagaatggtgaaaataatctgat |
| | | tctgaaacgctatggatccatcgaaagatggggctacacgcctgcggaacaacacatggtaacat |
| | | gtgccccaggggccgaaagccacggtgataggatcacccgtgtagtttgagatcatatcaatgttc |
| | | atagtctagtaagatgatttgaaatctaactggtctgatggctaactgcttgtcttattgcggcctaagg |
| | | atgtcctgcaggtacctttagagaaccattagagactattgatctgagcaggagccaaggtggtcttt |
| | | cccagccttggttaaaaagcgtctaagccgcggcagggggcgggaggccccctttcctcccaaa |
| | | ctataatatagattgt |
| 486 | Parabovirus | gatgtatccccatcccccagtgtgtatgccatactgcatagctcgcctatgccctatggattcacaac |
| | C | cctttcatataccctccctacccaaccccgtaaccacatgctttactccgcttggggttttgcggcccc |
| | | atgttgtgacgaaatggctacgcaatcaatgcggctaatggggcctgccgcttttaagtggcccca |
| | | gttagaagtttatgcacacccgcccattaggaggccaccagccaggtggtcagagggcaagcac |
| | | ttctgtttccccggtgaagtttgataagctgtgcccacggctgaagcagacagatccgttacccgcc |
| | | tcactactacgagacggctagtagtgtgtaatatccgaatttcattgatccgggtgttccccccaccc |
| | | agaaacgtgtgatgaggagcggcacccctcctatggcaacatagggcctctcctgcgctggcac |
| | | acgggctctatgagcatgaaatcaggagaaagtcacacgaagaccaattgtgctagtgagattcc |
| | | tccgcccccctgaatgcggctaatcccaactccggagcgcccgctggcaaacccgccagaaga |
| | | gcgtcgtaatgcgtaagtctggagcggaaccgactactttgggtgtggcgtgtttcctttatttccttt |
| | | gtatttgtat |
| 487 | Parabovirus | aacccataatccattgtccatcaatgttttatgggggggaccctttctcccctccccctccaaatacct |
| | B | tttacccctctgtaaccaagagtgtgcaaaatctatttactagcccagaattgcggcttctggggagg |
| | | tttattcctcatgcctaacaagatgttacgcaaactccgggctacggccctgggcttttgccctaaag |
| | | atttagaagtttacactatcgtccaacaggaggacaacaaaccagttgttctaaggacaagcacact |
| | | gtttccccggtgagactggatagactgtacccacggttgaaactggttgatccgttacccgactcac |
| | | tacttcgagaagattagtaggaaactgtgaaactgattccattgatccggatactttccccgtatcca |
| | | gaaactactgatgagggttgacttcccgactacggcgacgtagtgtcatccctgcgctggcagtag |
| | | gcctctttgaggatggaagatgtggatcggtaaccgaaggtcctattgagctagtgtttatacctccg |
| | | gcctcctgaatgcggctaatcctaacccatgatctagtgctcacaaaccagtgagtagctagtcgta |
| | | acgcgtaagtcgtgggcggaaccgactactttggagtgaccgtgtttcctattttacttttgtttg |
| 488 | Parabovirus | accgttacgcaccactcagttggtgtttggtggcaccaatgatggaacaaaaggctacaccacttg |
| | A3 | ggctacggcccgcgccaccttgtggcgcaaagacattagaagaatagcataccgcccactaggg |
| | | ccctgcagccagcagggtaacgggcaagcacttctgtctccccggtagaacggtataggctgtac |
| | | ccacggccgaaaactgaactatcgttacccgactccgtacttcgcaaagcttagtaggaaactgga |
| | | aagttcgagttattgacccggagtgttccccccactccagaaacgcgtgatgagggttgccacccc |
| | | gaccatggcgacatggtgggcatccctgcgctggcacgcggcctctaagaggataactcgctcct |
| | | actggtaaccgaagagccccgtgagctacggtttattcctccgcctccctgaatgcggctaatccta |
| | | acccatgagcagttgccatagatccatatggtggactgtcgtaacgcgtaagttgtgggcggaacc |
| | | gactactttgggatggcgtgtttccttgttttctccatttgttgttgtatggtgacaagttatagatctcga |
| | | tctatagcgtttcttgagagtttaccaaacatttattcaagtcgtacaattcttgtgtttaagcagtacagt |
| | | gtaagg |
| 489 | Felipivirus | gatgtcggatgacggctggccaccggggaaaaacggcaaatgtgcaccacctctgcaacccac |
| | 127F | gccgaccacgtttaaccatggcgttagtaggagtggaccactgcagtgggctctggtgtgcgaca |
| | | gtcagtggtagagtagacagtcctgactgggcaatgggaccgcgttgcgtatccctaggtggcat |
| | | cgagattcctctgctacccaccagcgtggactcctatggggggggccccataggctaggtctatac |
| | | tgcctgatagggtcgcggctggtcgaccactgactgtataaccagttgtaactcact |
| 490 | Boosepivirus | ttgaaagacctcggcatatatcgttgtcacaacggtatatgtcgagatctttctccccaccccctcca |
| | A | attcccttttccccctcttgcaacttagaagtagtttcacacagggcaataggatacgtgatccagcc |
| | | aggacacgtgagctcaagcacttctgtttccccgtccccttcacgtactacgggaatgttagtaattt |
| | | gtgtgcactttagtaaggttgatccgggattaaccccaaatcccagaaactggtgatgagcgttacc |
| | | acccccgccgggcgaccggaaggtttcgctgcgaggcaccagggcttcggcaccagaaaaag |
| | | gtaaagcaaatgaaggcgctactgtgctacgagaagtttcctccaggcccctgaatgcggctaatc |
| | | ctaaccagtgatccaccggtgcaaaaccatgtactaggtggtcgtaacgcgcaagtcgctggcgg |
| | | aaccgactactttgggtgtcctgtgtttccatattttattttattcaattttatggtgacaagagtaaagag |
| | | atacagatttgcagcc |
| 491 | Boosepivirus | ttttctcccctccccctccaactaccctttccccctcttgtaacgctagaagtttgtgcaaaccgcctgt |
| | B | agggtactgcaatccagcagtgcataggctaagcttttcttgttaccccaccccacattatactgagg |
| | | aggattgtgaaattgtgttagtatgggttagtagcggtgacccgggtaaccccaacccagaaactc |
| | | acggatgagatgaacaggaccccacatggtaacgtgtgtgttcgtctgccccgcaaggtgaggcc |
| | | gtgagagctttgcacgcgaaaaccttgaaaacccaaaagtaccttgagctcttcgctattttgtgtttc |
| | | ctccaggaccctgaatgcggctaaacctaacccgcgatccgcacgtagcaacccagctagagtgt |
| | | ggtcgtaatgcgcaagttgcgggcggtaccgactactttggtgttcctgtgtttcctttattttattttga |
| | | atttttatggtgacaacagctagaaaataagagtgaac |
| 492 | Phacovirus | gtgtgtcatttctcccctccccctcccaaaccttttccccctctaatcggattgattaacccggttaaag |
| | Pf-CHK1 | atgattaatggtttgtgagttgatatgatggcccggcattgaatccgggaattcttaagtaatggaatt |
| | | gcatccaatatgaaagtgagtgtggcaagctcacaagtagtacttggctctgcccattatttgagga |
| | | caactcttcttgactacaatgtgtttaaagtaaactggaccacattgtgtatccagacaactccatttg |
| | | ataatgtacgctggaaacgttttcagtgcatagggtcctaaagtggtgctgaaatattgcaagctcaa |
| | | tgggatactgaacgctgaaaaccgccgctgttatcatatgggcccctagtgggtaaatgttggcttt |
| | | aggcatatactgcttgggaatgcagtactggttgtagacagggtgatagcctaccggctggcgtag |
| | | ttgagaggtatagccagttgattgccat |
| 493 | HRVC3 | ttaaagctggatcatggttgttcccaccatgattacccacgcggtgcagtggtcttgtattacggtac |
| | QPM | atttccataccagttttatacaccccaccccgaaactcatagaagtttgtacacaatgaccaataggt |
| | | ggtggccatccaggtcgctaatggtcaagcacttctgtttccccggcacccttgtatacgcttcaccc |
| | | gaggcgaaaaatgaggttgtcgttatccgcaaagtgcctacgaaaagcctagtaacactttgaaaa |
| | | cccatggttggtcgctcagctgatacccaacagtagacctggcagatgaggctagacattcccca |
| | | ccagcgatggtggtctagcctgcgtggctgcctgcacaccctgccgggtgtgaagccagaaagt |
| | | ggacaaggtgtgaagagcctattgtgctcactttgagtcctccggcccctgaatgtggctaacccta |
| | | accccgtagctgttgcatgtaacccaacatgtatgcagtcgtaatgggcaactatgggatgggacc |
| | | aactactttgggtgtccgtgtttcctgttttactttttcattgcttatggtgacaattgtatctgatacact |
| | | tgttacc |
| 494 | HRVB27 | ttaaaacagcggatgggtatcccaccatccgacccacagggtgtagtgctctggtattttgtaccttt |
| | | gcacgcctgtttccccattgtacccctccttaaatttcctccccaagtaacgttagaagtttaaggaaa |
| | | caaatgtacaataggaagcatcacatccagtggtgttatgtacaagcacttctgtttccccggagcg |
| | | aggtataagtggtacccaccgccgaaagcctttaaccgttatccgccaatcaactacgtaatggcta |
| | | gtattaccatgtttgtgacttggtgttcgatcaggtggaccccccactagtttggtcgatgaggctag |
| | | gaactccccacgggtgaccgtgtcctagcctgcgtggcggccaacccagcttttgctgggacgcc |
| | | tttttacagacatggtgtgaagacctgcatgtgcttgattgtgagtcctccggcccctgaatgcggct |
| | | aaccttaaccccggagccttgcaacataatccaatgttgttgaggtcgtaatgagtaattctgggatg |
| | | ggaccgactactttgggtgtccgtgtttccttttattctttatattgtcttatggtcacagcatatatagcat |
| | | atatactgtgatc |
| 495 | HRVA73 | ttaaaactgggtttgggttgttcccacccaaaccacccacgcggtgttgtacactgttattccggtaa |
| | | ccttgtacgccagttttatatcccttcccccccttgtaacttagaagacatgcgaatcgaccaatagca |
| | | ggcaatcaaccagattgtcaccggtcaagcacttctgtttccccggctctcgttgatatgctccaaca |
| | | gggcaaaaacaattggagtcgttacccgcaagatgcctacgcaaaacctagtagcatcttcgaag |
| | | atttttggttggtcgctcagttgctaccccagcaatagacctggcagatgaggctagaaatacccca |
| | | ctggtgacagtgttctagcctgcgtggctgcctgcacacccacacgggtgtgaagccaaagattg |
| | | gacaaggtgtgaagagtcacgtgtgctcatcttgagtcctccggcccctgaatgcggctaacctta |
| | | accccgtagccattgctcgcaatccagcgagtatatggtcgtaatgagtaattacgggatgggacc |
| | | gactactttgggtgtccgtgtttcactttttacttatcaatttgcttatggtgacaatatatatagatatat |
| | | attgacacc |
| 496 | EV L | acatgggccagcccaccacacccactgggtgtagtagtctggttctatggaacctttctacgcctctt |
| | | ttgcttccctcccccatttctccttcgattgctccacctgtgatctttgcaacttagaagaaataatgaac |
| | | ccgcacaatagcgggcgctgagccacagcgtcaatgtgcaagcacttctgtttccccggaatggg |
| | | cccataggctgtacccacggctgaaagggaccggcccgttacccgccttggtactgcgagaatgt |
| | | tagtaactccctcgatagctttaggcgttacgctcagccctttgagcccgaagggtagttcgggtcg |
| | | atgaggctcgtcattccccactggcgacagtgtgacttgcctgcgttggcggcccggggtggggg |
| | | gcaacccccatccacgcctactgaaggacagggtgtgaaggcgctattgcgctactaaggagtcc |
| | | tccggcccctgaatgcggctaacccgaaccccgagcccacggtggtaaacccgccacaagtgg |
| | | gtcgtaatgagtaatttggggcagggaccgactactttgggtgtccgtgtttcctgtttttccatacgat |
| | | ggctgcttatggtgacaaccataagcaattggattggccatccggtgttcatattgcgaat |
| 497 | EV K | tcagcctgacgcaagtgcctccattggagtctctccaagccctccggggcttggagggcgccgac |
| | | cccctgcctagggggagcccacgacacggctggagtccattggcacaccgcagccacgattca |
| | | agccagaattgaaagcgggaagcacttctgtctccccggtgtggatcatacgctgtacccacggc |
| | | gaaaagtgaagcatcgttacccgactcggtacttcgagaagcccagtacagttgtggatctctgca |
| | | gggtatacgctcagcgtgacccctacgtagttccttgagatggctgagagaacaccccacgggcg |
| | | accgtgtctctcggcgcgtggctcaaggccgggccttcagtggctcggtgccttgcagagtgaag |
| | | cctccgaacagcctattgagctaccgtttagcctccgccctcttgaatgcggctaatcctaaccatg |
| | | gagcgcccgcccacagtccagtgggtagagcgtcgtaacgcgcaagtccgtggcggaaccgac |
| | | tactttagagtggcgtgtttccaatttatcctttataaagttgcttatggtgacaccacaagagatccac |
| | | gatttcttgtttcttatcactgagacacaagtcatattcatcaatctttattgcggaattaacttggtgcgt |
| | | ccaaacacatcagc |
| 498 | EV J 1631 | caccctgagggcccacgtggcgtagtactctggtatcaaggtacctttgtacgcctattttatttccct |
| | | tcccccacagtaacttagaagcttatctcatagttcaacagtagggtcactaaccaagtggctcagc |
| | | gaacaagcacttctgtttccccggtcctagtacctgtgaagctgtacccacggcggaaggggaaa |
| | | aagatcgttatccggccccctacttcggaaagcctagtaacaccattgaagcaatcgagtgttgcg |
| | | ctcagcacagtaacccctgtgtagctttggttgatgagtctgggcactccccactggcgacagcgg |
| | | cccaggctgcgttggcggccaaccgactcgggcaaccgggtcggacgctcgtttgtggacatgg |
| | | tgtgaagagcctactgagctagagggtagtcctccggcccctgaatgcggataatcctaaccccg |
| | | gagcacccacactcaatccagagtgcaggatgtcgtaacgcgtaagtctgggacggaaccgact |
| | | actttgggtgtccgtgtttcctgttttacttactttggctgcttatggtgacaatctagtgttgttaccatat |
| | | agctattggattggccatccggtgttttgaattgtgtgtttatactaattcttttacatatcacagacaacc |
| | | aaat |
| 499 | EV J N125 | cggtacctttgtacgcctattttacccccttccccttgtaacttagaagcaaagcaaaccagttcaata |
| | | gtaagcaacacaacccagtgttgtgacgaacaagtacttctgtttccccgggagggtctgacggta |
| | | agctgtacccacggctgaagtatgacctaccgttaaccggctacctacttcgagaagtctagtaata |
| | | ccattgaagttttgttggcgttacgctcaacacactaccccgtgtgtagttttggctgatgagtcacgg |
| | | cattccccacgggcgaccgtggccgtggctgcgttgcggccaaccaaggggcgcaagctccttg |
| | | gacgtcacttaacagacatggtgtgaagaacctattgagctaggtagtagtcctccggcccctgaat |
| | | gcggctaatcctaactccggagcacatcagtgcaacccagcatttggtgtgttgtaatacgcaagtc |
| | | tggagcggaaccgactactttgggtgtccgtgtttcctgttttaccttatttggctgcttatggtgacaa |
| | | tttgatattgttaccatatagctgttggattggccatccggatttttgaaagagacccaaaactttcttct |
| | | ctacttcagattcaagtgcgaagttttccttttcatatattacttactaatttgaagtaccaaag |
| 500 | EV I | ttagtactttctcacggggatagtggtatccctccctagtaatttagaagacttgaaaaaccgaccaat |
| | | aggcacctcgcatccagcggggtaaaggtcaagcacttctgtttccccgggtcgagtagcgatag |
| | | actgtgcccacggtcgaaggtgaaacaacccgttatccgactttgtacttcgggaagcctagtacc |
| | | accaaagattatgcttggggtttcgctcagcacgaccctggtgtagatcaggccgatggatcaccg |
| | | cattcctcacggcgactgtggcggtggtcgcgtggcagcctgccgatggggcaacccatcgga |
| | | cgccaagcatatgacagggtgtgaagagcctactgagctacaaagtattcctccggcccctgaat |
| | | gcggctaatcccaaccacggagcatttgctaccaaaccaggtagtggaatgtcgtaacgggtaac |
| | | tctgtggcggaaccgactactttgggtgtccgtgtttccttttaatttatcattctgtatatggtgacaact |
| | | atagtgctatctcgatttgcattactattgttgagattaaaactttattacattgttgcattttaccctttg |
| | | agtgagttttcacctgaacagattaatttactcatcctgtttatatattacaagcagaaatacttgcaaag |
| 501 | EV F1 | gcaatgctgcaccagtgcactggtacgctagtaccttttcacggagtagatggtatcccttaccccg |
| | BEV 261 | gaacctagaagattgcacacaaaccgaccaataggcgcaccgcatccagccgtgcagcggtca |
| | | agcacttctgtctccccggtctgtaaagatcgttatccgcccgacccactacgaaaagcctagtaac |
| | | tggccaagtgaacgcgaagttgcgctccgccacaaccccagtggtagctctggaagatggggct |
| | | cgcaccacccccgtggtaacacggttgcctgcccgcgtgtgcttccgggttcggtctcgtgccgtt |
| | | cacttcaacttcacgcaaccagccaagagcctattgtgctgggacggttttcctccggggccgtga |
| | | atgctgctaatcccaacctccgagcgtgtgcgcacaatccagtgttgctacgtcgtaacgcgtaagt |
| | | tggaggcggaacagactactttcggtaccccgtgtttcctctcattttatttaatattttatggtgacaat |
| | | tgttgagatttgcgctcttgcaacgttgccattgaatattggcttatactatttggttgccttttacaaaac |
| | | ctctgatatacccagttcttacattgatctgcttgtttttctcaatttgaagtatagactacaaatagcaaa |
| 502 | EV D94 | cgtggcggccagtactctggtatcacggtacctttgtacgcctgttttatatccccttcccccgcaact |
| | | tagaagaaaacaaatcaagttcactaggagggggtacaaaccagtaccaccacgaacaagcact |
| | | tctgtttccccggtgatgtcgtatagactgtaaccacggttgaaaacgattgatccgttatccgctctt |
| | | gtacttcgaaaagcccagtatcaccttggaatcttcgatgcgttgcgctcagcactcaaccccagag |
| | | tgtagcttaggtcgatgagtctggacactcctcaccggcgacggtggtccaggctgcgttggcgg |
| | | cctacctgtggtccaaagccacaggacgctagttgtgaacaaggtgtgaagagcctattgagctac |
| | | aagagaatcctccggcccctgaatgcggctaatcctaaccacggagcaagggtacacaaaccag |
| | | tgtatatcttgtcgtaacgcgcaagtctgtggcggaaccgactactttgggtgtccgtgtttccttttgt |
| | | ttttatcatggctgcttatggtgacaatctaagattgttatcatatagctgttggattggccatccggtaa |
| | | tttattgagatttgagcatttgcttgtttcttcaacaatttcacctattcattgcatttcagcagtcaaa |
| 503 | PV3 | tacctttgtacgcctgttttatactccctcccccgcaacttagaagcatacaattcaagctcaatagga |
| | | gggggtgcaagccagcgcctccgtgggcaagcactactgtttccccggtgaggccgcatagact |
| | | gttcccacggttgaaagtggccgatccgttatccgctcatgtacttcgagaagcctagtatcgctctg |
| | | gaatcttcgacgcgttgcgctcagcactcaaccccggagtgtagcttgggccgatgagtctggac |
| | | agtccccactggcgacagtggtccaggctgcgctggcggcccacctgtggcccaaagccacgg |
| | | gacgctagttgtgaacagggtgtgaagagcctattgagctacatgagagtcctccggcccctgaat |
| | | gcggctaatcctaaccatggagcaggcagctgcaacccagcagccagcctgtcgtaacgcgcaa |
| | | gtccgtggcggaaccgactactttgggtgtccgtgtttccttttattcttgaatggctgcttatggtgac |
| | | aatcatagattgttatcataaagcgagttggattggccatccagtgtgaatcagattaattactcccttg |
| | | tttgttggatccactcccgaaacgttttactccttaacttattgaaattgtttgaagacaggatttcagtgt |
| | | caca |
| 504 | EV C102 | ctttgtacgcctgttttacatcccctcccccacgtaactttagaagcaattcaacaagttcaatagagg |
| | | gggtacaaaccagtatcaccacgaacaagcacttctgtttccccggtgattttacataagctgtgcc |
| | | cacggctgaaagtgaatgatccgttacccgctcgagtacttcgaaaagcctagtatcgctttgggat |
| | | cttcgacgcgttgcgctcagcactctaccccgagtgtagcttaggctgatgagtctgggcattcccc |
| | | atcggcgacgatggcccaggctgcgttggcggcctacccatggctaacgccatgggacgctagt |
| | | tgtgaacaaggtgtgaagagcctattgagctactcgagagtcctccggcccctgaatgcggctaat |
| | | cccaaccacggatcaggtgcctccaacccaggaggtggcctgtcgtaacgcgcaagtctgtggc |
| | | ggaaccgactactttgggtgtccgtgtttccttttatcttttaaatggctgcttatggtgacaatcataga |
| | | ttgttatcataaagcgaattggattggccatccggtgaaatacaaacacattatttacttgtttgttggat |
| | | ttactccgctcacacagcttactcctaagataatatttattgtattgctggtaaggagacactattata |
| 505 | EV 30 | aagcaaggcaaacctgaccaatagtaggtgtggcacaccagccgcattttggtcaagcacttctgt |
| | | ttccccggaccgagtatcaataagctgctcacgcggctgaaggagaaaccgttcgttacccgacc |
| | | agctacttcgagaaacctagtaacactatgaacgttgcggagtgtttcgttcagcacttcccccgtgt |
| | | agatcaggtcgatgagtcaccgcattcctcacgggtgaccgtggcggtggctgcgttggcggcct |
| | | gcctacgggttcgcccgtaggacgctctaataccgacatggtgtgaagagtccattgagctagctg |
| | | gtagtcctccggcccctgaatgcggctaatcctaactgcggagcaggtgctcacagaccagtgag |
| | | tagcctgtcgtaacgggcaactctgcagcggaaccgactactttgggtgtttttccttttttcttctctta |
| | | tattggctgcttatggtgacaattaaagaattgttaccatatagctattggattggccatccggtgacg |
| | | agcagagccattgtttacctctttgttggatttgtacctttgaaccacaaagtcttgaataccattcatct |
| | | cattttaaagttcaactcagctaaaagaaa |
| 506 | SA5 | agtacttggtattccggtacctttgtacacctatttacaaaccctaccccttgtaaccttagaagcaatt |
| | | atttaaccgctcactagggggtgtgctatccaagcacatcaagagcaagcacttctgtctccccgg |
| | | gaggggctaatggtacgctgtgcccacggcggaaatgagccctaccgttaaccggcagtctactt |
| | | cgggaagcccagtaactacattgaaactttgaggcgttacactcagcacataaccccaatgtgtagt |
| | | tctggtcgatgagccttggcatcccccacaggcgactgtggccaaggctgcgttggcggccagc |
| | | ctgcggaccaaaagtccgtaggacgcctaattgtggacatggtgtgaagagcctactgagctaga |
| | | ctgtagtcctccggcccctgaatgcggctaatcctaaccctggagcatccgcgtgcaacccagtac |
| | | gtagggtgtcgtaatgcgtaagtctgggatggaaccgactactttgggtgtccgtgtttcttgtttttca |
| | | tactgggtcgcttatggttacaactaattgttgtaatcattggcagtgcgcgctgaccacgcgattatt |
| | | gatatttccatttgttggatactccaatagtgtcaactcatatacacaacttttaccactgatcaagataa |
| | | aa |
| 507 | EV A114 | tgtgcgcctgttttgaaaccccctcccccaactcgaaacgtagaagtaatgtacactactgatcagta |
| | | gcaggcgtggcgcaccagccatgtctcgatcaagcacttctgtttccccggactgagtatcaatag |
| | | actgctcacgcggttgaaggtgaaaacgtccgttacccggctaactacttcgagaaacctagtagc |
| | | accatagaaactgcagagtgtttcgctcagcacttcccccgtgtagatcaggtcgatgagtcactgc |
| | | aatccccacgggtgaccgtggcagtggctgcgttggcggcctgcctatggggcaacccatagga |
| | | cgctctaaggtggacatggtgtgaagagtctattgagctagttagtagtcctccggcccctgaatgc |
| | | ggctaatcctaactgtggagcgcatactcccaaaccagggagcagtgcgtcgtaacgggcaactc |
| | | cgcagcggaaccgactactttgggtgtccgtgtttccttttattcctatactggctgcttatggtgacaa |
| | | ttgagagattgttaccatatagctattggattggccatccagtgtgtaatagagcaatcatttaccaatt |
| | | tgttggatttactccattaacccacacgtctctcaacacactacatttcatcttactactgaacactaga |
| | | aa |
| 508 | Mobovirus | tattctcccacaaaccttcttgtaactctgttaagccttttacatccatgtaatttaattttctccacctaaa |
| | A | aggatttcccccatggtcctttttggctcgaacaaatgctacatagggtcttgttttctccccctggctc |
| | | tcttgccagggttccataccccaattcctctatttccatgatttttcatcatggtttatttttactgtcttct |
| | | tattttctgaggtgaccaactcctaagccgactgggtcgcggaagcccggactcctcgcatcactagg |
| | | gtgcgtagcgatgtaggcgaaaatattggttgctagatgcatacatatagtgaattgatactacacca |
| | | aactctgttctttttgaaactagctattttctaagtaaggtaggctacgggtgaaaccttaccattgcag |
| | | gtacgtgaaccgcaacggacatttggccgaagactggtgtacccacgtcagttataggacctcttc |
| | | aacgttggtggacggcatgtcactgattagttaggctagtgaatttaagttcagggggtatcttttagc |
| | | ttaagcgtgtattctagtaggacttgcagagcctccccacctaggaggatctctgtttatagccccttt |
| | | tccttgttccgttagttttccacacttttacaatatttgatgatttgtt |
| 509 | Burpengary | ctccccccccttccccttcccgagtaggagattggcatgtatgctctacatgcccgattctctcttgct |
| | Virus | cactctcttaaatcctggtggcggtctcggattaaacatttatgtcgtatctgggatcgtcttacttggt |
| | | ggtaattcctctgttgcctagggacctccggactgccggattaaaggtctcaacagagggcaatgt |
| | | acaaggaagtcattatacgctaattaagtatttgatgaatgactagtgtgacagggctgaggaactc |
| | | cccccgggtaaccggtgcctcagcgtccgaaagacacgtggataggatccaccctgttataccca |
| | | gcacgatgtaatagtcaaatacctctgatttgtgtaggatgtataaattgtgcattgtaaattttgggcg |
| | | tagagatgctccgaaggtaccccgttttacgggatctgatcggaggctaattacccaatgcgcccta |
| | | aataacttcatataatttctttttcttattcaaa |
| 510 | Hunnivirus | taacgtttggcaagaaccctcacctgtcaattgggaccaccactttcagtgaccccatgcgaagtag |
| | A1 | tgagagagaataagctttcttacccttcatttgtgaacccttcagtcgaagccgcttggaataagata |
| | | ggaggaaaagttcattctaaatggagtgaaacatgtacttcagaatttctagcacgcgctgggctttc |
| | | ttgcgtgtgacggcactgtcttgccggagctctccacactgacaccccacgcttgtggaccttggtg |
| | | gcagatgacaacactgcagctggaattgagtgtctggtacactctgtgtaacagtgaaaacaatgt |
| | | gatcacttcggtgagctagtagcctgtggaccaacaactggtaacagttgcctcaggggccaaaa |
| | | gccacggtgtttacagcaccctactggtttgattggagcaatccaagatgtcacagagttagtaattg |
| | | ccaagcagtccgtactggtatcttgacataccgtgcagttttggatagtgaaggatgccctgacggt |
| | | acccataggtaacaagtgacactatggatctaagcaggggctcactctacgctgctttacagctgg |
| | | ctgtgagttaaaaaacgtctagctatccacaacctaggggactaggttttccttttatttagattacaatt |
| | | at |
| 511 | Hunnivirus | acagtttttgacaaggaccctcacctgtcaatcgggaccaccactttcagtgaccccgtgcgaagt |
| | A2 | gttgagagaaagtgagctttcttacccttcatttgtgaacccttcagtcgaagccgcttggaataagat |
| | | ggaaggaaatgttcattctaaatggagtgaaacatatacttaatttccagtgtttagtggtctttccact |
| | | agacaacggcactgtcttgccggaactctacacaccaacattccacgcttgtgggactcaaatgttg |
| | | gatgacacagttgtagctggaactgagtgtttagtgcactctgtgtaacagtgaaaacaatgtgatca |
| | | cttcggtgggctagtagcctgtggactaacaactggtaacagttgcctcaggggccaaaagccac |
| | | ggtgttaacagcaccctactagtttgattggagcaatccatgatgttacagagttagtaactgccaaa |
| | | cagattgtactggtatcttggcataccgtgcaacttaggatagtgaaggatgccctggcggtaccca |
| | | taggtaacaagtgacactatggatctaaacaggggctcactctacgttgctttacaactagctgtga |
| | | gttaaaaaacgtctaactatccacaacctaggggactaggttttcctttttatttttatacacaacta |
| 512 | Ia Io | ggtgtccgggtgtgtgggatagacccagatgtgcagtggatgcgagcatttgagtcagagtagga |
| | | gcaagcccaggggcaaagggaccacattgtgtatcccgaatgaaggatcgagatttctctcctcat |
| | | tacccggtgtcttgtcactgagggggggcccaacagtcttagtcctatactgcctgatagggtcgc |
| | | ggctggccggactcaagtgctatagtcagttgattttcactc |
| 513 | Taura | ctttaaaagtcgtgcgtggcttcaccacgcacgatcagtactatcagttaaccactcttgaatatgctc |
| | Syndrome | aatgaccctattcaacactggtgtctcttagtacattattttagcacttaacgtgcatgagttttgcccat |
| | Virus | ttctttcaaaaaaatgagtattcgaggagacgtcccgctccccgtcttatttcaaccgtagactcgac |
| | | atctattggtggacatttaattccagtcgccgtaagttgcttctgccccgcgctatattttcttatacttat |
| | | ggttctataggtctggtttaaaacgtaaatagacggcccacaaactatagaacgcgtacccggaac |
| | | gccaatcccggataagtccctggatatatagatgcaccgcaatataagcctgcagactgtctcatat |
| | | act |
| 514 | ABPV | cccgtcaaaataacaacttataacacgatgttacccgaagaaaccattttagtgtaacatttaagatta |
| | | gaagtagttcatctaatagagataggcactattagaaggaggccttttctaaaggagccgttagtca |
| | | gcccagacaagcgcagtactttagaagagagaagttccccgatagcgaccgaaaagacgcgtttt |
| | | ccgtgctaactaatttaaatgtgggaacgaatattattattgaaattatgtgagccacgtagcaatcaa |
| | | gtcatgtttttgtcactacgtttactcatctaatgtagataattttgtttaagtacctatttaggtgtcatc |
| | | ccaccagagaagaaataatacgtaccggaacccagagtacaccccttattttaagccttactgggcttc |
| | | tctgttagttagtaatctggcccacgttttgcgttgagtggggtcccaacagtaggaattcgacggac |
| | | aagtagcaagcgagtcggtaccaattggtttagcatcgaaattactctgggcaggaagttactaaa |
| | | cgagaactttctgcttaaatcccaacgcacaaacaaatagagtaaataaataattata |
| 515 | BRAV-2 | tttgttttgcggctttgccgttgttcgggttttacctgttttcacacagcaaaacaggccttctagtttcgt |
| | | gcttaaacgagatcatgctcgaactagaactacatagctggtcactggactcataccacaccttgtg |
| | | gagctttatgggaaaggtggctagtgggctgtggaagtgactctgaccacatgcctctcaagtgtg |
| | | ggaaatcacggatcggtgtagcgacgacaacaggccttgggacaccctctccagtaatggagac |
| | | ccaaggggccaaaagccacgcctcgtgccctgttgttcacaaccccagtgcgacccgtgttagta |
| | | cctatttgcgagaactgtgtctggacagctaaacacaaccctagtgggagactaaggatgcccag |
| | | gaggtacccggaggtaacaagtgacactctggatctgacctggggagagagggcttgctttacag |
| | | gcgcctctctttaaaaagcttctatgtctcatcaggcaccggaggccgggcctttttccttttaaaatta |
| | | cactta |
| 516 | BRBV-1 | ccccccctacttaaagatgtacggttttgctgctttcacagagtaaagcagatagaggttctgaactg |
| | | gcaaactttacctcgaaacacgcccgtttttctgctgtgtctcacagactgtcctgtcacacttgtggc |
| | | ggcttgtgacactgtgaacatagtgagaccgaccaagacaacagatcaagtgtttgaacatcgaac |
| | | gtctaaactggatccgtaactggacatgttagggcaaggacttcccccctggtaacaggagcctgg |
| | | ctggccaaaagccccgctcattgagcctagcatgttgtcgaccctggactgttcagatttgttagtac |
| | | atggaattcacttgtcacggttcttctgaactcggtctctagtatgacagcctaaggatgccctccag |
| | | gtaccccggggtaacaagtgacacccgggatctgaggaggggactactttacgtagtttaaaaaa |
| | | cgtctaagctgttatggtgaccagaggctggcacctttcacttttaaaattacactactgactacaatt |
| | | gaagtgataacggttttacaggctttcaaactagttacacaagcactgttttcctgacacacacacttt |
| 517 | ERAV- | aatattggcgcgcgcatttgcgcgcccccccccatttcagccccctgtcattgactggtcgaaggc |
| | 1U188 | gttcgcaataagactggtcgtcacttggctgactatcgatcaggattagcgcgccctcgcgcggc |
| | | gggccgtcaagcccgtgcgctgtatagcgccaggtaaccggacagcggcttgctggattacccg |
| | | gtgccattgctctggatggtgtcaccaagctgacaaatgcggactgaacctcacaaagcgacaca |
| | | cctgtggtagcgctgcccaaaagggagcggaactcccccgccgcgaggcggtcctctctggcc |
| | | aaaagcccagcgttaatagcgccttttgggatgcaggagccccacctgccaggtgtgaagtggag |
| | | tgagtggatctccaatttggtctgttctgaactacaccatctactgctgtgaagaatgccctggaggc |
| | | aagctggttacagccctgaccaggggccctgcccgtgactctcgatcggcgcagggtcaaaaatt |
| | | gtctaagcagcagcaggaacgcgggagcgtttcttttccctttgtatcgac |
| 518 | GFTV | atggggaagggtatgacgtgccccttccttcttcggagaactcgctctagtggtctttccacttctgg |
| | | aaaagagtgagtgcacgtgatcaggaccgtcgaagacgacaaatacctggtgctctatctcatag |
| | | acgtttcacagctgtagcgacccctcagtagcagcggaagccccctcctggtgacaggagcctct |
| | | gcggccaaaagccacgtggataagatccactgctgagggcggtgcgaccctagcaccctgtgat |
| | | gcatactagttgtagcgtgccggactattggtctgtcataagacacctgatagagagaccaagaat |
| | | gtcctggaggtaccccgcgtgcgggatctgaccaggagaccattgcccaatgctttacaacgggt |
| | | ctatggtttaaaaactgtcgcagtctctccaaaccaagtggtcttggttttcaattactttgaatatttca |
| | | ct |
| 519 | SAFV | ttttcgacgtggttggaattgccatcatttccgacgaaagtgctatcatgcctccccgattatgtgatgt |
| | V13C | tttctgccctgctgggcggagcattctcgggttgagaaaccttgaatctttttctttggaaccttggttc |
| | | ccccggtctaagccgcttggaatatgacagggttattttcttgatcttatttctacttttgcgggttctatc |
| | | cgtaaaaagggtacgtgctgccccttccttctctggagaattcacacggcggtctttccgtctctcaa |
| | | caagtgtgaatgcagcatgccggaaacggtgaagaaaacagttttctgtggaaatttagagtgcac |
| | | atcgaaacagctgtagcgacctcacagtagcagcggactcccctcttggcgacaagagcctctgc |
| | | ggccaaaagccccgtggataagatccactgctgtgagcggtgcaaccccagcaccctggttcgat |
| | | gatcattctctatggaaccagaaaatggttttctcaagccctccggtagagaagccaagaatgtcct |
| | | gaaggtaccccgcgtgcgggatctgatcaggagaccaattggcggtgctttacactgtcactttgg |
| | | tttaaaaattgtcacagcttctccaaaccaagtggtcttggttttccaattttgttgaatggcaat |
| 520 | SAV | ggagatctaagtcaaccgactccgacgaaactaccatcatgcctccccgattatgtgatgctttctg |
| | P-113 | ccctgctgggtggagcatcctcgggttgagaaaaccttcttcctttttccttggaccccggtcccccg |
| | | gtctaagccgcttggaataagacagggttatcttcacctcttccttcttctacttcatagtgttctatact |
| | | atgaaagggtatgtgtcgccccttccttctttggagaacacgcgcggcggtctttccgtctctcgaaa |
| | | agcgcgtgtgcgacatgcagagaaccgtgaagaaagcagtttgcggactagctttagtgcccaca |
| | | agaaaacagctgtagcgaccacacaaaggcagcggaccccccctcctggcaacaggagcctct |
| | | gcggccaaaagccacgtggataagatccacctttgtgtgcggcacaaccccagtgccctggtttct |
| | | tggtgacacttcagtgaaaacgcaaatggcgatctgaagcgcctctgtaggaaagccaagaatgt |
| | | ccaggaggtaccccttccctcgggaagggatctgacctggagacacatcacatgtgctttacacct |
| | | gtgcttgtgtttaaaaattgtcacagctttcccaaaccaagtggtcttggttttcactctttaaactgattt |
| | | cact |
| 521 | VHEV | aattccttcttcctttctccttggacctcggtcccccggtctaagccgctcggaatatgacagggttatt |
| | | ttcacctcttctctcttctacttcatagtgttctatactatgaaagggtatgtgtcgccccttccttcttgga |
| | | gaacgtgcgtggcggtctttccgtctctcgaaaaacgtgcgtgcgacatgcagagtaacgcaaag |
| | | aaagcagttcttggtctagctctggtgcccacaagaaaacagctgtagcgaccacacaaaggcag |
| | | cggaaaccccctcctggtaacaggagcctctgcggccaaaagccacgtggataagatccaccttt |
| | | gtgtgcggtgcaaccccagcaccctggtttcttggtgacaccttagtgaaccctcgaatggcaatct |
| | | caagcgcctctgtaggaaagccaagaatgtccaggaggtaccccttcctcatggagggatctgac |
| | | ctggagacacatcacacgtgctatacacttgtgcttgtgtttaaaaattgtcacagctttcccaaacca |
| | | agtggtcttggttttcccttaacttcgaaaagtcactatggcctgcaaacatggatacccagacgtgt |
| | | gccct |
| 522 | TRV | atgcgacgtggttggagattaaaccgactccgacgaaagtgctatcatgcctccccgattatgtgat |
| | NGS910 | gttttctgccctgctgggcggagcattctcgggttgatacaccttgaatccttcatccttggacctcag |
| | | gtcccccggtctaagccgcttggaatacgacagggttattttccaatcttctcctttctactttcatgag |
| | | tcctattcatgaaaagggtctgtgctgccccttccttcttggagaatctgcgcggcggtctttccgtct |
| | | ctcgaaaagcgcagatgcagcatgctggaaccggtgaagaaaacagttctttgtggaaacttaga |
| | | gcagacatcgaaacagctgtagtgacctcacagtagcagcggaaccccctcctggtaacaggag |
| | | cctctgcggccaaaagccccgtggataagatccactgctgtgagcggtgcaaccccagcaccct |
| | | ggttcgatggttgttctctgtggaaccagagaatggtctttctcaagccctccagtagagaagccaa |
| | | gaatgtcctgaaggtaccccgcatgcgggatctgatcaggagaccaatcgtcagtgctttacactg |
| | | gcgctttggtttaaaaactgtcacagcttctccaaaccaagtggtcttggttttcacttttatcaaactgt |
| | | ttc |
| 523 | EMCV2 | aaatactggtcgaaaccgcttgggataagaccggggtttgttaatgtctcaatgttattctccaccca |
| | RD1338 | attgacgtcttttgtcaattggagggcagtgaaaccttgcccttgcttcttgcagaggattcccagtgg |
| | | tctttccgctctcgacaagggaattcatgatccaccaaaagttgtgaagagagcaggtcccatgga |
| | | agctttctgacgactgatgatgactgtagcgaccctttgcaggcagcggacccccccacctggtga |
| | | caggtgcctctgcggccaaaagccacgtgtttaacagacacctgcaaaggcggcacaaccccag |
| | | tgcctcatcaaaagtctgatgactgtggaaatagtcaaccggcttttcttaagcaaatttggtgtcgg |
| | | ggctgaaggatgcccggaaggtaccacactggttgtgatctgatccggggccacagtacatgtgc |
| | | tttacacatgtagctgcggttaaaaaacgtctaggccccccgaaccacggggacgtggttttccttt |
| | | gaaaaccacgattacaat |
| 524 | EMCV1 | gtctgctcgatatcgcaggctgggtccgtgactacccactccccctttcaacgtgaaggctacgata |
| | JZ1203 | gtgccagggcgggtactgccgtaagtgccaccccaaaacaacaacaaaccccccctaacattact |
| | | ggccgacgccgcttggaataaggccggtgtgcgtttgtctatatgttatttcccaccacattgccgtc |
| | | ttttggcaatgtgtgggcccggaaacctggccctgtcttcttgacgagcattcctaggggtctttccc |
| | | ctctcgccaaaggaatgcaaggtctgttgaatgtcgtgaaggaagcagttcctctggaagcttcttg |
| | | aagacaaacaacgtctgtagcggccctttgcaggcagcggaaccccccacctggcgacaggtg |
| | | cctctgcggccaaaagccacgtgtataagatacacctgcaaaggcggcacaaccccagtgccac |
| | | gttgtgagttggatagttgtggaaagagtcaaatggctctcctcaagcgtattcaacaaggggctga |
| | | aggatgcccagaaggtaccccattgtatgggatctgatctggggcctcggtgcacatgctttacatg |
| | | tgtttagtcgaggttaaaaaacgtctaggccccccgaaccacggggacgtggttttcctttgaaaaa |
| | | cacgatgataat |
| 525 | EMCV1 | atgtggtcgaagccacttggaataagaccggcgtgcgcttgtctatatgttacttccaccacattgcc |
| | AnrB-3741 | gtcttttggcaatgtgagggcccggaacctggccctgtcttcttgacgaacattcctaggggactttc |
| | | ccctctcgccaaaggaatgtaaggtctgttgaatgtcgtgaaggaagcagttcctctggaagcttctt |
| | | gaagacaaacagcgtctgtagcgaccctttgcaggcagcggaaccccccacctggtaacaggtg |
| | | cctctgcggccgaaagccacgtgtataagatacacctgcaaaggcggcacaaccccagtgccac |
| | | gttgtgcgttggatagttgtggaaagagtcaaatggctttccccaagcgtattcaacaaggggctga |
| | | aggatgcccagaaggtaccccactggttgggatctgatctggggcctcggtgcaggtgctttacac |
| | | ctgttgagtcgaggaaaaaaacgtctaggccccccgaaccacggggacgtggttttcctagaaaa |
| | | ccactatgacaat |
| 526 | Cosavirus | cgtgctttacacggtttttgaaccccacaccggctgtttggcgcagcaggacagtaggtatattttctt |
| | D1 | tcatttctcttttctagccgcgtaggttctatctacgcgggcggagtgatactcccgctccttcttggac |
| | | aggcggcctccacgctctttgtggatcttaaggctgccaagtcactggtgtttgaagtgaagaatgg |
| | | agagacactagggcgtttcatgtggctttgccagggattgtagcgatgctgtgtgtgtgtgcggattt |
| | | cccctcgtggcgacacgagcctcacaggccaaaagccctgtccgaaaggacccacacagtggg |
| | | gttgccccgacccctcccttcaaagctttgtgtaaacaaacttttgtttagactttcttaagcttctctca |
| | | catcaggccccaaagatgtcctgaaggtaccctgtgtatctgaggatgagcaccaccaactaccc |
| | | ggacttgtgggacgtgtcccacagacgcatgtggtattccagccccctccttttgaggagggggct |
| | | tttgctcgctcagcacaggatctgatcaggagattcatctctggtgctttacaccagagcatggattta |
| | | aaaattgcccaaggcctggcaaacaacctaggggactaggttttctctattttaaaagatgtcaat |
| 527 | Cosavirus | cgtgctttacacggtttttgaaccccacaccggctgtttggcgcttgcaggacagcaggtttattttctt |
| | B1 | ttaactctctctttctagccacacacgatctatgtgtgtgggcggagtgatactcccgttccttcttgga |
| | | caggcggcctccacgccctttgtggatcttaaggctaccaagtcactggtgttggaaagtgaagag |
| | | aaaggagttccttgggaactacatgtggcattgacagaggttgtagcgatgctgtgtgtgtgtgcgg |
| | | attacccccgtggcgacacggaccccacaggccaaaagccctgtccgaaaggacccacacagt |
| | | ggagcaaccccagctcccctcttcaatgttttgtgttagcaaccttggtattattttctctcaagcttc |
| | | caatacaccgggccccaaagatgtcctgaaggtaccccgtgtatctgaggatgagcaccatcaacta |
| | | cccggacttgttctttcgagaacagacgcatgtggtaacccagccccgatcctaaggggtcgggg |
| | | cttttgctcactcagcacaggatctgatcaggagacctcccccccctgctttacagggggcggggg |
| | | tttaaaaattgcccaaggcctggcaaataacctaggggactaggttttcctttttattttaaagttg |
| | | tcaat |
| 528 | Cosavirus | ccgtgctttacacggtttttgaaccccacaccggctgtttggcgcttgcaggacagcaggtttattttc |
| | A SH1 | ttatgctctttatttctagccaacagggttctatcctgttgggcggagtgatactcccgttccttcttg |
| | | gacagattgcctccacgatctttgtggatctcaaggtgatcaagtcactggtaaatagagcgaaggttg |
| | | aggaaacctgaggaatttccatgtggttttgccaggagttgtagcgatgctgtgtgtgtgtgcggatt |
| | | tcccctcatggcaacatgagcctcacaggccaaaagccctgtccgaaaggacccacacagtgga |
| | | gcaatcccagctccctcctacaaagctttgtgagaatgaactcacgtttattcttctttattctctgtt |
| | | tacatcaggccccaaagatgtcctgaaggtaccttgtgtatctgggcatgagcaccatcaactacccgg |
| | | acttgcatttcggtgcagacacatgtggttacccagcccctctgctttggcagaggggcttttgctcg |
| | | ctcagcacgagatctgatcaggagccctttcccagtgtgctttacacctggcggggggttaaaaatt |
| | | gcccaaggcctggcaaaataacctaggggactaggttttccttttattaacaatgtctgtcatt |
| 529 | Malagasivirus | ctttattttcttatgtaactcttctttttaagttttattttgcctacttgtgagcttatgcgggaccactgt |
| | B | cttagacaaccccacatttgtcatgagtaagtacacgcaaccattacgattactttttaaccgtctgacctt |
| | | ttgataacaactgaagttaggcgtgaaacatgcatttataccaaagtagccccgcatttccccactacg |
| | | gtgggggggctaccctactggctaggaactgtagccattatgtgttgcctggctttcaggatctcac |
| | | aacacaacagttctctcacaatggaatatgggtgagattgcagtgacatgaacaagtatctagtagt |
| | | acatagactcaagcctagttgcctgcggaacaacatgtggtaacacatgccccagggtccaaaag |
| | | acaagggttaacagccccactaggtgtctgtgtgtgaagaatacatagtagtgagaatgatctcac |
| | | ctgttagtacagaatgagtatggcaggtgaaggatgtcctacaggtacccattatatggatctgagt |
| | | aggagaccactagtggtggctttaccgccaggtgagtggataaaaagcgtctagccaagccaac |
| | | agcactagggatagtgctttctattttattttattttcagtgtat |
| 530 | Mosavirus | cccccccctcaaattgcaacgatatagctaatggcgagattgagatgctatatcacctccttctaagtt |
| | A2 | atagacctcatctgattgataaggacgtaatttggtcgaaaccgcttggaataagaccgatgcgcgt |
| | SZAL6 | agtcatgatgatgatgtaagatctaggaacttatccaatctgcttatgtctatgtaagtagaggggca |
| | | ggcctcattgccctaattctttctaccgagtatctgctagggtttctagcggcagaatacaggattga |
| | | gggatacaagatactactgatcgattgtcgattgggaaacagtagatacttcaaagctaccagtag |
| | | cgtggactcacagccagcggactacccctcatggtaacatgagcctctgggcccacaaggcacg |
| | | tcgcaagacctgtgagacggcaaccccagcctagctttgttgaggaaacaagcgataacatgaca |
| | | tgagagaccggaaggattcttgtattgtgagccgaaggatggcctctaggtacctcattttatgagat |
| | | ctgaggaggtgctcttgagttggtgctttacactgcacaacacagagttaaaaagcgtctaagctcac |
| | | ccggaaattgggaaatttccgttatttccattttgtttgcaaagtcgttc |
| 531 | SVV | ctgggccctcatgcccagtccttcctttccccttccggggggtaaaccggctgtgtttgctagaggc |
| | | acagaggagcaacatccaacctgctttttgtggggaacggtgcggctccaattcctgcgtcgccaa |
| | | aggtgttagcgcacccaaacggcgcatctaccaatgctattggtgtggtctgcgagttctagcctac |
| | | tcgtttctcccctatccactcactcacgcacaaaaagtgtgctgtaattacaagatttagccctcgcac |
| | | gagatgtgcgataaccgcaagattgactcaagcgcggaaagcgctgtaaccacatgctgttagtc |
| | | ccttcatggctgcgagatggctatccacctcggatcactgaactggagctcgaccctccttagtaag |
| | | ggaaccgagaggccttcttgcaacaagctccgacacagagtccacgtgattgctaccaccatgag |
| | | tacatggttctcccctctcgacccaggacttctttttgaatatccacggctcgatccagagggtgggg |
| | | catgatccccctagcatagcgagctacagcgggaactgtagctaggccttagcgtgcttaggatac |
| | | tgcctgatagggcgacggcctagtcgtgtcggttctataggtagcacatacaaat |
| 532 | PTV A | actagtccttggacttttgttgtgtttaaacacagaaatttaattacctggccatgaattcattggattaa |
| | | ccccttctgaaagacttgctctggcgcgagctaaagcgcaattgtcaccaggtattgcaccagtggt |
| | | ggcgacagggtacagaagagcaagtactcctgaccgggcaatgggactgcattgcatatcccta |
| | | ggcacctattgagatttctctggggcccaccggcgtggagttcctgtatgggaatgcaggactgga |
| | | cttgtgctgcctgacagggtcgcggctggccgtctgtactttgtatagtcagttgaaactcacc |
| 533 | PTV B | cttccttttaattcgtaactgataagtgatagtccttggaagctaggttttagttacgctagttttggat |
| | | tatcttgtgcccaacatttgttttcgaacatatgttgtgtttaaacacagaaatctagtttctttggttat |
| | | gagtttaatggaatatccttttgaaagacttgccttggcgcgggctagagcgcaattgtcaccaggtatt |
| | | gcaccaatggtggcgacagggtacagaagagcaagtactcctgactgggtaatgggactgcattgca |
| | | tatccctaggcatctattgagatttctctggagcccaccagcatggagacctgtatgggaatgcagg |
| | | actggacttgtgctgcctgacagggtcgcggctggccgtctgtactttgtatagtcagttgaaactca |
| | | tt |
| 534 | Tottorivirus | cccctttacgtaactgcaacttaaagagtaccctactgcattggatgtgtggtaaacttttacgcacac |
| | | atttgtagtagtgttagttatgttctacctaatgagtatgcatgcacccgtcgaaacacgcttgtgataa |
| | | gataggtgagtccatgtgactaatctcattaagataaataagcaccctacaacgcacggcacgctc |
| | | gtgtcttccgtgcggggccgggacaacagcggcctaaatcttctaggtgaccaccatgcttttggg |
| | | actatggcaccactgtggacgtgagtacctggcagtaagtctgtgaaaagatggaaggtgtccca |
| | | agctatggggcgtatgcatatagcctgcggaacaaacaacggcgacgttgtccccagggcccaa |
| | | aaggcacgtggataagatccacctatatgtttaccccatagtgtaagtcactggaagtcctagtaatg |
| | | gatgtctggagtaaggctcacggggtagggcgaaggatgcccagaaggtacccgtaggtaacct |
| | | taagagactatggatctgatctggggaccggatggcgccatcaccatgacgtggaggccggttta |
| | | aaaaacgtctaagcccgaccaacaacctaggggactaggttttccttttttattcatgtatgacgtt |
| 535 | Posavirus | acatttccttgcgtgcgcacccgaaaatttattgaacttggcttgaatcataagtaatgcttcttatagc |
| | 1 | ggacactttgagaatataatgatgtatggattaatgtatactgttttaaataacaaacctagacacgc |
| | | agttgcgttgatggttgtatcaatcacatataagtgttgaactcgtgttaatcctcgatcgctatatgttt |
| | | gccgcctacttccaataaaatagattacatgcgcgtcatgcctttgtgggttacctattggcctctgac |
| | | aaaaacaagtcgtaagatttgtagcttcccggtgtaaaaagctgggcgcggtctggctctcgtagg |
| | | gtggaaaggtccaccaatggctggttgagtgtaagctccggtgtcctggttgtcgcaattccaggc |
| | | gtcgtaataacctatattgcatctgactctaactcttgtggctctactgtatctagttcttgttctactaa |
| | | ctctaataatactactggctctaatactgaaaaacttacatatgttaatatagataatatccttgatcctg |
| | | atatccctcacgtcactgaagttcgccgaaaacgaatttcagatcatatcattgaatctcaaggatgtac |
| | | ttgctctgaacctactataactcctcatgcgttttcattttctactcttggc |
| 536 | A105-675 | ccacccacagcaagaatgccatcatctgtcctcacccccatttctcccctccacccctgcaaccatt |
| | | acgcttactcgcatgtgcattgagtggtgcacgtgttgaacaaacagctacactcacgtgggggcg |
| | | ggttttcccgccatcggcctctcgcgaggcccaccatccctttcctcccataactacagtgctttg |
| | | gtaggtaagcatcctgatcccccgcggaagctgctcgcgtggcaactgtggggacccagacagg |
| | | ttatcaaaggcacccggtctttccgcctccaggagtatccctgctagtgaattctagtggggctctgc |
| | | ttggtgccaacctcccccaaatgcgcgctgcgggagtgctcttccccaactcaccctagtatcctct |
| | | catgtgtgtgcttggtcagcatatctgagacgatgttccgctgtcccagaccagtccagcaatggac |
| | | gggccagtgtgcgtagtcgtcttccggcttgtccggcgcatgtttggtgaaccggtggggtaaggt |
| | | tggtgtgcccaacgcccgtactttggtgacaactcaagaccacccaggaatgccagggaggtacc |
| | | ccgcctcacggcgggatctgaccctgggctaattgtctacggtggacttcttgcaccatttctttctt |
| | | ctgttc |
| 537 | A110-675 | acctttgtgcgcctgttttataccccctcccccaactgtaacttagaagtaacacacaccgatcaaca |
| | | gtcagcgtggcacaccagccacgttttgatcaagcacttctgttaccccggactgagtatcaataga |
| | | ctgctcacgcggttgaaggagaaagcgttcgttatccggccaactacttcgaaaaacctagtaaca |
| | | ccgtggaagttgcagagtgtttcgctcagcactaccccagtgtagatcaggtcgatgagtcaccgc |
| | | attccccacgggcgaccgtggcggtggctgcgttggcggcctgcccatggggaaacccatggg |
| | | acgctctaatacagacatggtgcgaagagtctattgagctagttggtagtcctccggcccctgaatg |
| | | cggctaatcctaactgcggagcacacaccctcaagccagagggcagtgtgtcgtaacgggcaac |
| | | tctgcagcggaaccgactactttgggtgtccgtgtttcattttattcctatactggctgcttatggtgac |
| | | aattgagagatcgttaccatatagctattggattggccatccggtgactaatagagctattatatatcc |
| | | ctttgttgggtttataccacttagcttgaaagaggttaaaacattacaattcattgttaagttgaatacag |
| | | caaa |
| 538 | 18-675 | cccacagcaagaatgccatcatctgtcctcacccccaattttcccttttcttcccctgcaaccattacg |
| | | cttactcgcatgtgcattgagtggtgcatgtgttgaacaaacagctacactcacatgggggcgggtt |
| | | ttcccgccctacggcctctcgcgaggcccaccccttccctccccttataactacagtgctttggtag |
| | | gtaagcatcctgatcccccgcggaagctgctcacgtggcaactgtggggacccagacaggttatc |
| | | aaaggcacccggtctttccgccttcaggagtatccctactagtgaattctagcggggctctgcttggt |
| | | gccaacctcccccaaatgcgcgctgcgggagtgctcttccccaactcaccctagtatcctctcatgt |
| | | gtgtgatggtcagcatatctgagacgatgttccgctgtcccagaccagtccagtaatggacgggc |
| | | cagtgcgtgtagtcgtcttccggcttgtccggggcatgtttggtgaaccggtggggtaaggttggtg |
| | | tgcccaacgcccgtactttggtgacacctcaagaccacccaggaatgccagggaggtaccccac |
| | | ctcacggtgggatctgaccctgggctaattgtctacggtggttcttcttgcttccacttctttcttctg |
| | | ttcacg |
| 539 | A115-675 | acctttgtgcgcctgttttataccccccccaacctcgaaacttagaagtaaagcaaacccgatcaata |
| | | gcaggtgcggcgcaccagtcgcatcttgatcaagcacttctgtaaccccggaccgagtatcaata |
| | | gactgctcacgcggttgaaggagaaaacgttcgttacccggctaactacttcgagaaacccagta |
| | | gcatcatgaaagttgcagagtgtttcgctcagcactacccccgtgtagatcaggccgatgagtcac |
| | | cgcacttccccacgggcgaccgtggcggtggctgcgttggcggcctgcctatggggcaacccat |
| | | aggacgctctaatacggacatggtgcgaagagtctattgagctagttagtagtcctccggcccctg |
| | | aatgcggctaatcctaactgcggagcacatacccttaatccaaagggcagtgtgtcgtaacgggta |
| | | actctgcagcggaaccgactactttgggtgtccgtgtttccttttaatttttactggctgcttatggtgac |
| | | aattgaggaattgttgccatatagctattggattggccatccggtgactaacagagctattgtgttcca |
| | | atttgaggatttaccccgctcacactcacagtcgtaagaacccttcattacgtgttatttctcaactcaa |
| | | gaaa |
| 540 | A73-675 | ttactccattcagcttcttcggaacctgttcggaggaattaaacgggcacccatactccccccaccc |
| | | cccttttgtaactaagtatgtgtgctcgtgatcttgactcccacggaacggaccgatccgttggtgaa |
| | | caaacagctaggtccacatcctcccttcccctgggagggcccccgccctcccacatcctcccccc |
| | | agcctgacgtatcacaggctgtgtgaagcccccgcgaaagctgctcacgtggcaattgtgggtcc |
| | | ccccctcatcaagacaccaggtctttcctccttaaggctagccccggcgtgtgaattcacgttgggc |
| | | aactagtggtgtcactgtgcgctcccaatctcggccgcggagtgctgttccccaagccaaacccct |
| | | ggcccttcactatgtgcctggcaagcatatctgagaaggtgttccgctgtggctgccaacctggtga |
| | | caggtgccccagtgtgcgtaaccttcttccgtctccggacggtagtgattggttaagatttggtgtaa |
| | | ggttcatgtgccaacgccctgtgcgggatgaaacctctactgccctaggaatgccaggcaggtac |
| | | cccacctccgggtgggatctgagcctgggctaattgtctacgggtagtttcatttccaatccttttat |
| | | gtcggagtc |
| 541 | Kobuvirus | ttactccattcagcttcttcggaacctgttcggaggaattaaacgggcacccatacacccccatccc |
| | 16317 | ctttctgcaacttaagtatgtgtgctcgtgatcttgactcccacggaatggatcgatccgctggagaa |
| | | caaactgctagatccacatcctcccttcccctgggaggaccttggtcctcccacatcctccccccag |
| | | cctgacgtaccacaggctgtgtgaagcccccgcgaaagctgctcacgtggcaattgtgggtcccc |
| | | ccttcatcaagacaccaggtctttcctccttaaggctagccccgatgtgtgaattcacattgggcaac |
| | | tagtggtgtcactgtgcgctcccaatctcggccgcggagtgctgttccccaagccaaacccctggc |
| | | ccttcactatgtgcctggcaagcatacctgagaaggtgaccgctgtggctgccagcctggtaaca |
| | | ggtgccccagtgtgcgtaaccttcttccgtcttcggacggtagtgattggttaagatttggtgtaaggt |
| | | ccatgtgccaacgccctgtgcgggatgaaacctctactgccctaggaatgccaggcaggtacccc |
| | | acccccgggtgggatctgagcctgggctaattgtctacgggtagtttcatttccaattcttttatgtcg |
| | | gagtc |
| 542 | Aichivirus | ttactccattcagcttcttcggaacctgttcggaggaattaaacgggcacccatacatccccatcccc |
| | Chshc7 | tttctgtaacttaagtatgtgtgcttgtaatcttgactcccacggaatggatcgatccgctggagaaca |
| | | aactgctagatccacatcctcccttcccctgggaggaccttggtcctcccacatcctccccccagcc |
| | | tgacgtaccacaggctgtgtgaagcccccgcgaaagctgctcacgtggcaattgtgggtcccccc |
| | | ttcatcaagacaccaggtctttcctccttaaggctagccccgatgtgtgaattcacattgggcaacta |
| | | gtggtgtcactgtgcgctcccaatctcggccgcggagtgctgttccccaagccaaacccctggcc |
| | | cttcactatgtgcctggcaagcatatctgagaaggtgttccgctgtggctgccagcctggtaacagg |
| | | tgccccagtgtgcgtaaccttcttccgtctccggacggtagtgattggttaagatttggtgtaaggttc |
| | | atgtgccaacgccctgtgcgggatgaaatctctactgccctaggaatgccaggcaggtaccccac |
| | | cctcgggtgggatctgagcctgggctaattgtctacgggtagtttcatttccaatccttttatgtcgga |
| | | gtc |
| 543 | Aichivirus | actccattcagcttcttcggaacctgttcggaggaattaaacgggcacccatacacccccatcccct |
| | Goiania | tttttgcaacttaagtatgtgtgctcgtaatcttgactcccacggaatggatcgatccgctggagaaca |
| | | aactgctagatccacatcctccctcccccctgggaggacctcggtcctcccacatcctccccccag |
| | | cctgacgtatcacaggctgtgtgaagcccccgcgaaagctgctcacgtggcaattgtgggtcccc |
| | | ccttcatcaagacaccaggtctttcctccttaaggctagtcccgatgtgtgaattcacatcgggcaac |
| | | tagtggtgtcactgtgcgctcccaatctcggccgcggagtgctgttccccaagccaaacccctggc |
| | | ccttcactatgtgcctggcaagcatatctgagaaggcgttccgctgtggctgccagcctggtaaca |
| | | ggtgccccagtgtgcgtaaccttcttccgtccccggacggtagtgattggttaagacttggcgtaag |
| | | gttcatgtgccaacgccctgtgcgggatgaaacctctactgccctaggaatgccaggcaggtacc |
| | | ccaccttcgggtgggatctgagcctgggctaattgtctacgggtagtttcatttctaattctttcatgtc |
| | | ggagtc |
| 544 | Aichivirus | ttactccattcagcttcttcggaacctgttcggaggaattaaacgggcacccatacacccccacccc |
| | ETHP4 | ctttttgcaacttaagtatgtgtgctcgtgatcttgactcccacggaatggatcgatccgctggagaa |
| | | caaactgctagatccacatcctcccacccttgggaggacctcggtcctcccacatcctccccccag |
| | | cctgacgtaccacaggctgtgtgaagcccccgcgaaagccgctcacgtggcaattgtgggtccc |
| | | cccttcattaagacaccaggtctttcctccttaaggctagtcccgatgtgtgaattcacattgggcaac |
| | | tagtggtgtcactgtgcgctcccaatctcggccgcggagtgctgttccccaagccaaacccctggc |
| | | ccttcactatgtgcctggcaagcatatctgagaaggtgttccgctgtggctgccagcctggtaacag |
| | | gtgccccagtgtgcgtaaccttcttccgtcttcggacggtagtgattggttaagatttggcgtaaggtt |
| | | catgtgccaacgccctgtgcgggatgaaacctctactaccctaggaatgccaggcaggtacccca |
| | | ccctcgggtgggatctgagcctgggctaattgtctacgggtagtttcatttccaattcttctatgtcgg |
| | | agtc |
| 545 | Aichivirus | tactccattcagcttcttcggaacctgttcggaggaattaaacgggcacccatacacccccaccccc |
| | DVI2169 | ttttctgcaacttaagtatgtgtgctcgtaatcttgactcccacggaatggatcgatccgctggagaac |
| | | aaactgctagatccacatcctcccttcccctgggaggaccccggtcctcccacatcctccccccag |
| | | cctgacgtatcacaggctgtgtgaagtccccgcgaaagctgctcacgtggcaattgtgggtccccc |
| | | cttcatcaagacaccaggtctttcctccttaaggctagccccgatgtgtgaattcacattgggcaact |
| | | agtggtgtcactgtgcgctcccaatctcggccgcggagtgctgttccccaagccaaacccctggc |
| | | ccttcactatgtgcctggcaagcatatctgagaaggtgttccgctgtggctgccagcctggtaacag |
| | | gtgccccagtgtgcgtaaccttcttccgtctccggacggtagtgattggttaagatttggtgtaaggtt |
| | | catgtgccaacgccctgtgcgggatgaaacctctactgccctaggaatgccaggcaggtacccca |
| | | ccttcgggtgggatctgagcctgggctaattgtctacgggtagtttcatttccaattcattttatgtcgga |
| | | gtc |
| 546 | Aichivirus | gcttcttcggaacctgttcggaggaattaaacgggcacccatacacccccacccccttttctgcaac |
| | DVI2321 | ttaagtatgtgtgctcgtaatcttgactcccacggaatggatcgatccgctggagaacaaactgcta |
| | | gatccacatcctcccttcccctgggaggaccccggtcctcccacatcctccccccagcctgacgta |
| | | tcacaggctgtgtgaagtccccgcgaaagctgctcacgtggcaattgtgggtccccccttcatcaa |
| | | gacaccaggtctttcctccttaaggctagccccgatgtgtgaattcacattgggcaactagtggtgtc |
| | | actgtgcgctcccaatctcggccgcggagtgctgttccccaagccaaacccctggcccttcactat |
| | | gtgcctggcaagcatatctgagaaggtgttccgctgtggctgccagcctggtaacaggtgcccca |
| | | gtgtgcgtaaccttcttccgtctccggacggtagtgattggttaagatttggtgtaaggttcatgtgcc |
| | | aacgccctgtgcgggatgaaacctctactgccctaggaatgccaggcaggtaccccaccacggg |
| | | tgggatctgagcctgggctaattgtctacgggtagtttcatttccaattcttttatgtcggagtc |
| 547 | Aichivirus | tactccattcagcttcttcggaacctgttcggaggaattaaacgggcacccactttcctgtcctctccc |
| | rat08 | cttttctgtaactccaagtgtgtgctcgtaatcttgactcccgcggattgaccgctccgctggtgaaca |
| | | aactgctaggtcatctcctccccacccttgggcgtccttccgggcgtccacaccctccccccagcc |
| | | tgacgtgtcacaggctgtacaaagaccccgcgaaagctgctaacgtggcaattgtgggtcccccc |
| | | tttgtaaaggaaccgagtctttctcccttaaggctagacccctgtgtgaattcacaggtggcaactag |
| | | tggaccactgcatgctcccgacctcggccgcggagtgctgttccccaagtcgtaacactgaccac |
| | | acttatgtgcctggcaagcatatctgagaagatgttccgctgtggctgccaaacctggtaacaggtg |
| | | ccccagtgtgcgtagtcttcttccgtcttcggacggtaggtgttaggtaaagatgcggcgtaaggtt |
| | | caagtgccaacgccctggaagggatgacccttctactgccctaggaatgccgcgcaggtacccc |
| | | aggttcgcctgggatctgagcgcgggctaattgtctacgggtagtttcatttccctcttcttccactgg |
| | | catc |
| 548 | Aichivirus | actccattcagcttcttcggaacctgttcggaggaattaaacgggcacccactttcctgtcctctccc |
| | Rt386 | cctttctgcaactcaagtgtgtgctcgtaatcctgactcccacgggagaccgccccgttggtgaac |
| | | aaacagctaggtcattccctccctacccctgggcgccatttcagtggcgttcatatcctccccccag |
| | | cctgacgtgtcacaggctgtgcaaagtccccgcgaaagctgctcacgtggcaattgtgggtcccc |
| | | cctttgtgaaggaaccgagtctttctcccttaaggctagacccctgtgtgaactcacaggtggcaac |
| | | tagtggttccactgcatgctcccgacctcggccgcggagtgctgttccccaagtcgtgacactgac |
| | | ctccacttatgtgcctggcaagcatatctgagaagatgttccgctgtggctgccaaacctggtaaca |
| | | ggtgccccagtgcgtgtagtcttcttccgtctccggacggtaagtgtgtggtaaagatgcggcgtaa |
| | | ggttcaagtgccaacgccctggaagggatgacccttctactgccctaggaatgccgcgcaggtac |
| | | cccaggttcgcctgggatctgagcgcgggctaattgtctacgggtagtttcatttccctctcttttc |
| | | actggcatc |
| 549 | Norway | gtataagggttgggaaccttgtaccaagctacctctgccattcagtatttgggagtagaagtagatgt |
| | Rat | gtttacaaactcacacgtgtgggggcggggatagactgtgccagcggtcgtgtaccagcacctac |
| | Pestivirus | gcatacgtgtggactgcgaaccaggagagcacctaggtctgacaagctgtgagaacacagtagt |
| | | cgtcagtgagtcagctggtaaggatcacccacctggatactcacgtggacgagggagtttcccag |
| | | tcagaaacctacaccagaggaggggtcctctggagacatggatggtctgagtaacagactatcta |
| | | ctggggtgtgctgcctgacagggtctcggctgatagcctggctagcagtataaaaatcagttgaatt |
| | | ggcatatgagttgtgaacatctagtaaacaatgaaagacaaaaacaaaaaatgagcataataaaaa |
| | | aattgtacaatccactactcaggtgtggctgcagactt |
| 550 | Porcine | tttgaaaagggggtgggggggcctcggccccctcaccctcttttccggtggccattcgcccgggc |
| | Kobuvirus | caccgttactccactccactccttcgggactggtttggaggaacacaacagggcttcccatccctgt |
| | GS2 | ttaccctttattccatcatcctttccccaagtttaccctatccacaccccactgactgactcctttggattt |
| | | tgacctcagaatgcctatttgacctcccactcgcctctcccttttcggattgccggtggtgcctggcg |
| | | gaaaaagcacaagtgtgttgcaggctaccaaactcctacccgacaaaggtgcgtgtccgcgtgct |
| | | gagtaatgggataggagatgcctacaacaggctcgcccatgagtagagcatggactgcggtgca |
| | | tgtgacttcggtcaccacgggcatagcattgctcacccgtgaatcaagtcatcgagatttctctgacc |
| | | tctgaagtgcactgtggagcgtggctgggaatccacgcttgaccatgtactgcttgatagagtcgc |
| | | ggctggccgactcatgggttaaagtcagttgacaagacac |
| 551 | Kobuvirus | cctacccaagggttacatgggaccatattcctcctcccctgtaactttaagttttgtgcccgtattcag |
| | SZAL6 | actccaggcggatgttgtgtcgcccgtcctgtgaacaaacagctagacactttcctcccctccctct |
| | | gggctgctccggcagtccactccctccccccagcgtaacatgccccgctggagtgatgcacctgg |
| | | aagtcgtggacgtgggttagtaacttcggtgaaaacccactataatgacaactggttgacccccac |
| | | actcaaaggactcgagtctttctcccttaaggctagcccggccacatgaatttgcagctggcaacta |
| | | gtgagtccaccatgtcccgcaacctcggctgcggagtgctgttccccaagcgtatgccttccttctg |
| | | taagagtgcgcctggcaagcacatctgagaagtcgttccgctgcgtcgtgccaacctggcgacag |
| | | gtgacccagtgtgcgtagacttcttccggattcgtccggctcttctctaggaaacatgcgtgtaaggt |
| | | tcatgtgccaaagccctgcgcgcggtgttcttctactgccctaggaatgtgccgcaggtacccctac |
| | | ttcggtagggatctgagcggtagctaattgtctacgggtagtttcatttccatcttctcttcaggtcgac |
| | | atc |
| 552 | Kobuvirus | gaccttctggtacttcttcgcctgggtcacaaaagcgaagaacctgcctctctaacgccagacgag |
| | sheep TB3 | cggcattaaacttgaacttctggcactctccactctcccttttccctgtccctttccccactgcgctctc |
| | | aaggtcgcgcaatcctgggactagcccagttttaaaagttcctggcaccctttgcccctctaggccc |
| | | ttaaggtaggaactgaccttgtgctgtgatctcggtgcgggagtgctaccacgtagtcatcgtaagc |
| | | ctcgtttctggactgccctggcaaggctacagagtaccgtgttccgctgtggatgccatccgggta |
| | | accggacccccagtgtgtgtagcggtatgttcacggtccgccgtgttcaccagattcctgacctgg |
| | | ctttgctagaaatggtgtgtgcccaatccctgtgaccagtatcaattacatcacctaggaatgctagg |
| | | aaggtaccccagtcctgagctgggatctgatcctaggctaattgtctacggtgatgctccttttattttc |
| | | ttacaactgctattgactgtctgattgctgattctgctcttgtgctcttctgctctggctcattctcaa |
| | | gggttctctttgtccaagatcctttggttctctccttgttccacttgccactgccaacgcttgtc |
| 553 | Pronghorn | gtatacgcagttagttcatcctgtgtatacagattggagactctaaaaacaacgattcggaataggg |
| | antelope | gcccgcggcgaagaccgaagacaggctaaccatgccgttagtagggctagcaccaaaacgcg |
| | pestivirus | ggaactagacacttaggagagtggtctggctactctaagaggtgagtacaccttaaccgtcaagg |
| | | gttctactcctcagagaggactagagatgccctgtggacgggggcatgcccaagagttagcttag |
| | | ccggggcgggggttgttccggtgaaagtagcaatattgaccacactgcctgatagggcggagca |
| | | ggccccctaggtagtctagtataaaatgtctgctgtacatggcac |
| 554 | Porcine | tacgcggggtataacgacagtagacaagtgtcgttatgcatcattggccataacaaattatctaattt |
| | pestivirus | ggaatagggacctgcgacctgtacgaaggccgagcgtcggtagccattccgactagtaggacta |
| | isolate | gtacaaataggtcaactggttgagcaggtgagtgtgctgcagcggctaagcggtgagtacaccgt |
| | Bungowannah | attcgtcaacaggtgctactggaaaggatcacccactagcgatgcctgtgtggacgaggacatgtc |
| | | caagccaatgttatcagtagcgggggtcgttactgagaaagctgcccagaatgggtagttgcacat |
| | | acagtctgataggatgccggcggatgccctgtattttgaccagtataaatattatccgttgtaaagcat |
| 555 | Porcine | gcagatatcggtggtggacctgggggttgggctcaccgtgccccttcatggggtagacctcactg |
| | pestivirus | cttgatagagtgccggcggatgcctcaggtaagagtataaaatccgttgttcactaac |
| | 1 | |
| 556 | Pestivirus | gtatacgagtttagctcaatcctcgtatacaatattgggcgtcaccaaatatagatttggcataggca |
| | giraffe-1 | acaccccgatgcgaaggccgaaaagggctaaccatgcccttagtaggactagcaaaaaatcggg |
| | | gactagcccaggtggtgagcttcctggatgaccgaagccctgagtacagggcagtcgtcaacagt |
| | | tcaacacgcagaataggtttgcgtcttgatatgctgtgtggacgagggcatgcccacggtacatctt |
| | | aacctatccgggggtcggataggcgaaagtccagtattggactgggagtacagcctgatagggtg |
| | | ttgcagagacccatctgataggctagtataaaaaactctgctgtacatggcac |
| 557 | Classical | gtatacgaggttagttcattctcgtatgcatgattggacaaattaaaatacaatttggatcagggcctc |
| | swine | cctccagcgacggccgaactgggctagccatgcccacagtaggactagcaaacggagggacta |
| | fever virus | gccgtagtggcgagctccctgggtggtctaagtcctgagtacaggacagtcgtcagtagttcgac |
| | | gtgagcagaagcccacctcgatatgctatgtggacgagggcatgcccaagacacaccttaaccct |
| | | agcgggggtcgctagggtgaaatcacaccacgtgatgggagtacgacctgatagggtgctgcag |
| | | aggcccactattaggctagtataaaaatctctgctgtacatggcac |
| 558 | Human | tcagggttggtaggtcgtaaatcccggtcaccttggtagccactataggtgggtcttaagagaaggt |
| | pegivirus | taagattcctcttgtgcctgcggcgagaccgcgcacggtccacaggtgttggccctaccggtggg |
| | isolate | aataagggcccgacgtcaggctcgtcgttaaaccgagcccgtcacccacctgggcaaacgacgc |
| | JD2B1I | ccacgtacggtccacgtcgcccttca |
| 559 | Human | cccggcactgggtgcaagccccagaaaccgacgcctatttaaacagacgttatgaaccggcgcc |
| | pegivirus | gacccggcgaccggccaaaaggtggtggatgggtgatgccagggttggtaggtcgtaaatcccg |
| | isolate | gtcatcttggtagccactataggtgggtttaaagggaggtcaaggtccctctggcgcttgtggcga |
| | GBV-C-ZJ | gaaagcgcacggtccacaggtgttggccctaccggtgtgaataagggcccgacgtcaggctcgt |
| | | cgttaaaccgagcccattacccacctgggcaaacaacgcccacgtacggtccacgtcgccctaca |
| | | atgtctctcagaccaataggctttgccggcgagagacaaggaccagtgggggctgggcgacgg |
| | | gggtcgtataggaagaaaaatgccacccgccctcacccgaaggttcttgggctaccccggctgca |
| | | ggccgccgcggagctggggtagcccaagaaccttcgggtgagggcgggtggcatttttcttccta |
| | | taccgatc |
| 560 | Human | tggtcaccttggtagccactataggtgggtcttaagagaaggaaagattcctcttgtgcctgcggcg |
| | pegivirus | agaccgcgcacggtccacaggtgttggccctaccggtgtgaataagggcccgacgtcaggctcg |
| | isolate | tcgttaaaccgagcccatttcccgcctgggcaaacgacgcccacgtacggtccacgtcgccctttt |
| | JD2B8C | aatgtctctcttgaccaataggttcatccggcgagagacaaggaccagtgggggccgggggtca |
| | | cagggatggaccctgggccctgcccttcccggcggggtggggaaagcatggggccacccagct |
| | | ccgcggcggcctgcagccggggtagcccaagaaccttcgggtgagggcgggtggcatttttctt |
| | | cctataccgatc |
| 561 | Hepatitis | gccgggtggaaggcccggaaccgccccaccacctcaactaggtggtaagggtacgtctatcggt |
| | GB | ccggctggcccgaaaggcggtggatcctgtgtgttagggttcgtaggtggtaaatcccagcacag |
| | virus A | gtggtaatcgctatagggcaggcttatcccggtgaccgcttccctggatcctggagcgggtcgtgg |
| | | cggcacggtccacaggagtggggcctccggtgtgaataagccctcgtctggagcatcagacgtt |
| | | aaactgagacgtcccgaagagatcggaacgacgccccacgtatggcaacgccgcttaaaaccct |
| | | tcggggacagctatgcgggttgacaatgccagtggggggccgggcccactattgagtgggctcc |
| | | gagttcctctagggatggccgaaaggcagccatggggccacccaggcggcgccgtgctacagg |
| | | cggcaaggggaaaaatccttcgggtgaccccgggtggcattccctcccttagcagcatgagtgtg |
| | | gtggtagctgcaacc |
| 562 | Simian | ggggaatctcaccccccgtccggttccggaagaatcggaaaccgacaccctgaccaatcattctt |
| | pegivirus | gatcatagagtggatgaagtgaaagccagacgaaagccggcggatgggtggtgacagggttgg |
| | | taggtcgtaaatcccggccaccctggtacccggtataagttgggcggaagctgactgaagctccg |
| | | tgctcttttctgtgcgttcttggtgcacggtccacaggtgacgcctataccggtgtgaataataggcc |
| | | gactcgagcggagtcgttaaactgagaacctccatacggatggcaacttggcttgcgtacgggga |
| | | cgccgctaaagtcacagtgggttaagtccggcgggttgacaaccccagcaaggcgagggggtc |
| | | ctattgttggactctgccagacccggtggaggtaggcatggggtggcccagctccgcggcgcgc |
| | | tacagccggggtagcccaaaatccgaaaggtgagggcgggccacatgtccgaaatttagtcaag |
| | | c |
| 563 | Pegivirus | agaatggtctaagtggttgccaccgtggtccgaaggggaggaggacctacgctgccagggttgg |
| | I | caggtcgtaaatcccgggtgtaggagatccctccttgttaggactgctggtagctggggggtcggt |
| | | gaccccctgggcaaccgccaaacccggacgaccgggtggcggctccatgttggcacggtccac |
| | | aggtgtgaaccctaccggtgtgaataagggttggtggttgcggtccaccttaaacgtagtatgcatt |
| | | gggcttggtaaaacaccgctcgtagtacggaacgccgcctttaaagacacagtaggcgtagccg |
| | | gcgggttgacaatccatacggggggtggggtgtggtcatggatctgtccacaccaccttcatgcg |
| | | gccctctaagcaagccataccggggggaggcgcgcggcaccgcactgccgggcaaggggaa |
| | | gaaccttcgggtgacccccccccaaccaccgtccgatcaatgctaatgttgcgtttaggcgtgaca |
| | | ccggcaca |
| 564 | Pegivirus | agaatggtgtgatccgtcgccgctccagcggaaagcgggcgggatctagtggttagggttgttcg |
| | K | cgtaaatcccacactagtggtacgctcgtataacgtgggagcagccggTggggtcgacccccc |
| | | Acctggcggctgctgagcaccggacgaagcgcggggggtgaacgctaacccgcggcccggg |
| | | ctgccaacgttaggcacgtcaggctggaagacgttaaacacagggccccccctcaaccctgatc |
| | | cgaggccagagaccaaggtacgccgcccctttaaaggcgttactcgtccaataggatctctccgg |
| | | cgggttgtcaaaccttgctggccctggtgatggttacgggagggggtggggcggggagtagaag |
| | | ccccgcccggcatgggggtaccaagctcggcacgcccagcacgcgtggcgtaggggaaaaat |
| | | ccttcgggtgacccctggtaccataaagtaattaacatgagcatgccgctagggtgtgctttttcttcc |
| | | ttccttgggaaggcggtggcacc |
| 565 | Theiler's | tgataccgtgtcccggtacgacctcgcgcgtccccaagctcgccctgaggggggagcgtaaggg |
| | disease- | cgcgtagtggggtagccccccaaaccgagccaccctagtgagtgactttagaatggttagggaga |
| | associated | ctaccgccttcgctgtttggggacctaatgatccgcgtgccagggttcttcgggtaaatcccggcgc |
| | virus | ggtgttttgggttcagggcagtaggggcagacgggccagcagtcgctggttcctggtaccaccac |
| | | cctatccggacgacctccctcacgaaaggtcgccacggtctgtggctcgacgacgcctataattca |
| | | gtccgaggggcgcagccctcgttaaacttaggcaaggttcctcgccattgatttggccaggggttt |
| | | aagtgaacgccgcccttttaatgtttaatagggttctttcccggcgggttgacaaacacttccctggg |
| | | ctcttcgttggcctcggttccttgatgcttcggcacccatgagcgcacaggggggggaccctgcga |
| | | cagtccgccaagaggaaaatccttcgggtgacctcgtgcgcaacccaatcccttcttcttccacatg |
| | | gcgtgtctgtggtgcatgctgtg |
| 566 | Rodent | ggacttcggtccccctgttactctgcgagccaccgcagagccagggttggtacgcccgaggtgtt |
| | pegivirus | agaccccggccgaaagctcctaaccatggggttagtaggacgtggtaaatgccactgaggggtt |
| | | ggagagctggtagagcgagtaagtcggcgtaaggcccgagtacgggcctcccagcccgggtca |
| | | gcctaaacctggctgtgatacccggtgcatggagggcgtgtcccaacgctcgatcgctgtagggt |
| | | gggtccctgcagttgggtgtggctaccctgctcgtactgcttgatagagtcccggcggacggacc |
| | | agctctcgtcagtccgtggagttgcac |
| 567 | Human | aactgttgttgtagcaatgcgcatattgctacttcggtacgcctaattggtaggcgcccggccgacc |
| | pegivirus | ggccccgcaagggcctagtaggacgtgtgacaatgccatgagggatcatgacactggggtgag |
| | 2 | cggaggcagcaccgaagtcgggtgaactcgactcccagtgcgaccacctggcttggtcgttcatg |
| | | gagggcatgcccacgggaacgctgatcgtgcaaagggatgggtccctgcactggtgccatgcg |
| | | cggcaccactccgtacagcctgatagggtggcggcgggcccccccagtgtgacgtccgtggag |
| | | cgcaac |
| 568 | GB virus | cccccggcactgggtgcaagccccagaaaccgacgcctatctaagtagacgcaatgactcggcg |
| | C/Hepatitis | ccgactcggcgaccggccaaaaggtggtggatgggtgatgacagggttggtaggtcgtaaatcc |
| | G virus | cggtcaccttggtagccactataggtgggtcttaagagaaggttaagattcctcttgtgcctgcggc |
| | | gagaccgcgcacggtccacaggtgttggccctaccggtgggaataagggcccgacgtcaggct |
| | | cgtcgttaaaccgagcccgttacccacctgggcaaacgacgcccacgtacggtccacgtcgccct |
| | | tcaatgtctctcttgaccaataggcgtagccggcgagttgacaaggaccagtgggggccggggg |
| | | cttggagagggactccaagtcccgcccttcccggtgggccgggaaatgc |
| 569 | Equine | agaatggggagttaactcctggcactggcccgaagcatgaactgatcgcggtggcagggttcttc |
| | Pegivirus | gggtaaatcccggccgcgtgttgtgattgtgttagggcaggtgacagtcggcagggtcgaccccc |
| | 1 | tgcttcaggaccactgtcttcctggacgaccgttgctgaaaaagggccgccacggtctgtagctcg |
| | | ccgacgcttctaattcaggccggaggaccacgctccgtaatcgagcccaagtactcaaaccccag |
| | | gacaaagggcgcagggttacctggtactacgagcttgggtgtccctgggagtaatcccagggtgc |
| | | c |
| 570 | Culex | atataaatcccagtttggttaaacctatttcaaggcttaagttgtttattattttatcgccgctcgtga |
| | theileri | ctataaagttgcctagcggagagagataaagaagaaggagttcaaggctcagggcagggcgcaagtt |
| | flavivirus | ccctggtccctaggccgctcgcaggaaggaggagtgaagaagaagaaagagaaggagaggac |
| | | caccgccgaaagaaggcaggtgcctcacaagagggccaaccagcgtgttggaccagtggcca |
| | | acgccggacggcgtggtggcctgctgggacgcctggggattggatggagtgccttcctacagga |
| | | agacatcgttcaagccatc |
| 571 | Bussuquara | agtatttcttctgcgtgagaccattgcgacagttcgtaccggtgagttttgacttaacgcagtgagaa |
| | virus | aagttttcgaggaaagacgagaagcgaattctctga |
| 572 | Zika Virus | agttgttgatctgtgtgagtcagactgcgacagttcgagtctgaagcgagagctaacaacagtatca |
| | | acaggtttatttggatttggaaacgagagtttctggtc |
| 573 | Yokose virus | agtaaattttgcgtgctagtcgctgagcgtcagaccgcaaagtgagtttttagtgatctaaagtgagg |
| | | agttattcttactgtcatcaaacactacaaataaacacgttgaaattatttccggaagaacaactgtcc |
| | | ggaataaagacg |
| 574 | Wesselsbron | agtatattctgcgtgctaatcgttcgacgttagtccgtggagtgagcttctattagagtcgttaacacg |
| | virus | tttgaataatttctactgaaaggagtagaagaaaggagattcattccca |
| 575 | Equine | acctccgtgctatgcacggtgcgagtcagcgttttgcgcagctttgcgctacacgcgtcgtccaac |
| | hepacivirus | gcggagggattcttccacattaccatgtgtcactccccctatggagggaccaccccgcccacacg |
| | | gaaataggttaaccatacctatagtacgggtgagcgggtcctcctagggcccccccggcaggtcg |
| | | agggagctgaaattcgtgaatccgtgagtacacggaaatcgcggcttgaacgtcatacgtgacctt |
| | | cggagccgaaatttgggcgtgccccacgaaggaaggcgggggcggtgttgggccgccgcccc |
| | | ctttatcccacggtctgataggatgcttgcgagggcacctgccggtctcgtagaccataggac |
| 576 | Hepacivirus | accacaaacactccagtttgttacactccgctaggaatgctcctggagcaccccccctagcagggc |
| | B | gtgggggatttcccctgcccgtctgcagaagggtggagccaaccaccttagtatgtaggcggcgg |
| | | gactcatgacgctcgcgtgatgacaagcgccaagcttgacttggatggccctgatgggcgttcatg |
| | | ggttcggtggtggtggcgctttaggcagcctccacgcccaccacctcccagatagagcggcggc |
| | | actgtagggaagaccggggaccggtcactaccaaggacgcagacctctttttgagtatcacgcct |
| | | ccggaagtagttgggcaagcccacctatatgtgttgggatggttggggaagccatccataccgta |
| | | ctgcctgatagggtccttgcgaggggatctgggagtctcgtagaccgtagcac |
| 577 | Hepacivirus | cagggtttcgaccctggcccggatacctatcgccttacgccgaaaggtaacgagtaggagtcggg |
| | I | tccccaggcccttaccgccaccaagccaggtggggaggtatgggagccggggggtgcagctg |
| | | gtagctccatgggggacgccccgtgagcggatgctgcatcgataccgggttagctctctgggaga |
| | | gcggcacttgacaccacgaatccgggaaccggacaatcgccggcgtgggacgcgttgcctccg |
| | | tggccgagcaatttggcatgcccgtggtgaagagtgatggtgggggggggccccccttccagta |
| | | ccgtactgcctgatagggtcttgcctcaagcccagagagtcgaggctgaaaaccgccatc |
| 578 | Hepacivirus | gccgctcccgaaagggagtccggcgcgtcatcccactccgaggagtggggtggcgtccccgtg |
| | J | tgccggggaaccatgaagcctaagggcatccacattttagaatgaacttgaagcacgtttcgctgg |
| | | ccggaaagtcctgggttcccatggccagggttccgcaggtgggtaaatcccggtggggttccatc |
| | | caggatatacggcaggcgggcgtagtccggcggttcggacgacgtgtgggtcgcctacggtgg |
| | | attgttcacaggatgggcactccggtgtgaataggccccgtcagggtgcgctgacgttaaactcag |
| | | gccttgcctggtgttcggggaggattgcagggccacgccgcctctaagggccgtatggcacagta |
| | | cttcttcgggcgggttgtcaaggccctccaacgcgacaccagtgcctcggcaggcatggggcca |
| | | cccagctcggcgtcccgcacacagacggcgtaggggaaaatcagcaatgtgaccccgggtggc |
| | | attttccttctctctacttccatgcatgatcaaccgcaatc |
| 579 | Hepacivirus | gggaacaatggtccgtccgcggaacgactctagccatgagtctagtacgagtgcgtgccacccat |
| | K | tagcacaaaaaccactgactgagccacacccctcccggaatcctgagtacaggacattcgctcgg |
| | | acgacgcatgagcctccatgccgagaaaattgggtatacccacgggtaaggggtggccacccag |
| | | cgggaatctgggggctggtcactgactatggtacagcctgatagggtgctgccgcagcgtcagtg |
| | | gtatgcggctgttcatggaac |
| 580 | Icavirus | cgaagtttaagctaagcaccctcgggcgttcccggattatgtgatcacatcaatttgatggctggtca |
| | | ccacgcaacgcctggagagatactcttacttttctcttaagatccccggtcatttgacgcttgtaggat |
| | | gatagggttattttccactataaatactttcatactcttggatgttctatatccaagacgggaggaccta |
| | | ccccgtaccccttagaggtgagatgccaagaacaggccctttctgttctctcgacaatggcatcata |
| | | ggcaacaagcatcacaccaagattgctaagttttgttaagagttcttcaagctatagggtggctgtag |
| | | cgaccttctgatgcctgcggataccccttcggagcgatccgtgccacaggggccaaaagccacg |
| | | gctaacgcccatcaggagcggcacttaccccgtgccccacccttgaaacttgaatgttcacactgg |
| | | cttctctcggctttctgaactgtctgcagttggggccccgaaggatgccctggaggtaccccatttta |
| | | tgggatctgaccaggggacacctcagctctctaagttgctggtgtttaaaaaacgtctaagggccc |
| | | ccaccccttaggtggagggatccacctttcctttattttttaaaactcttttatggtcacaattgttt |
| 581 | Antarctic | ctaggagactacgcagtgggataagatgactatgatgtcgtacgggcagaagccagtacagtcga |
| | penguin | agtcgagaccgacgtcgaggatttgactctgcctgacctagtgccatc |
| | virus A | |
| 582 | Forest | tattggatccgcctccgggcaaaggttactttcttgtacctcggcttagccacagggtgaccccttgt |
| | pouched | acgtaggggccccgacgtagcactggtctgacaacaccttctcggcatttcaccttctgcccgctct |
| | giant rat | tccgggcggtggtgtcaagaagcagcagtgctcttctcttttcttcctgcagttcaccgagccctacg |
| | arterivirus | gggggtaggtg |
| 583 | Avisivirus | cattcccctttccccagccatgggttaaatggcccctcaccaggttcggtgctgtctaggcttccagt |
| | Pf-CHK1 | aaagaagtcaaccgagcattgaacaaaacctcagtgggtatggtagttaaccccgtccactggac |
| | | aactttgtcctcttaaaagtggatcaatccaccccaactccccccctagccacctgagccatggtgg |
| | | atagcagtgacgaaactagggaccccaatacctctagtgccaagagaattcccccctcgcgagag |
| | | gtgctcttgggcccgaaaggctagttggcagggtgaagtgaaggaagctgctagcgtggcaacc |
| | | ttaagcgtagcccgaagctgaccttagaggttaaccctagtggaccactggatgaagctgtggag |
| | | gtggtggataggaaagttggccacttgtgagtagatgcccagaaggcataaggctgatctggggc |
| | | cagtgactataccgttccggtaaacctggtataaaaaccatgaaagcaagtgggtttaaaatttcttct |
| | | aattccttcatttcagtagtgataactggcaga |
| 584 | Avian | accaaacaaggactagataacccacgtgaccgttaactggaaaataagatgttgtaggggcgacc |
| | paramyxovirus | tagttggaattcgaccccggctccgaaacctctaattgtggttattggcagtctagtctacttctaacg |
| | penguin | |
| 585 | Newcastle | accaaacagagaatctgtgaggtacgataaaaggcgaagaagcaatcgagatcgtacgggtaga |
| | disease | aggtgtgaaccccgagcgcgaggccgaagctcgaacctgagggaaccttctaccgat |
| | virus | |
| 586 | Bat Hp- | ttaagcttcggcttgttgcataggaccggaaaggtactatctaccctaactcttgtagttagactctcta |
| | betacoro- | aacgaactttaaaactggttgtgtccttcagtagtctgtatggccattggaggcacaccggtaattatc |
| | navirus | aaatactaagaagattcatagtacatccttgtctagcttttggttggcagtgagcctacggtttcgtcc |
| | | gtgtcgctcacaattatccacacagtaggtttcgtccgctgtggttgagttgctagtccgttgctgtttc |
| | | gtcagccatctacaactcgacacc |
| 587 | Basella alba | ggaatatggctaatcggcttattctaatcaaacgcaaaagacttatgacacagaccggacctgaac |
| | endonavirus | gaggtgataaaacacctcgttcaggttcaaaacgtagaagattcattcctccgattagaaatacaact |
| | | acgtctaagcacgatagagatggtatcaagatcggttttagaccacgagaaaatcggcaaatgaaa |
| | | gtacaagttgggtggtttaaattaccaagaacagtaacattcaagaacaacggcaacccgtttgtta |
| | | cctcatttcgtaaattgtttagaagtaacaaagataaattatttaatggtgggaagaacctaagtacag |
| | | taccagccagaagtagtgaaatgacagaaatgtttatgttcatgtccacgctagagggccaattgtc |
| | | aatccaagatcgagatccaaaaataatcaataagtctatatacatgatagaggta |
| 588 | Ball python | ccccttcacccataggcactaggagaacaggataacccctaacggggcatcctgcctgtgaccttt |
| | nidovirus | cagattcgctagttagatatcttcacagactctgctaggcttctgacccagtccgttcccaaagtccgt |
| | | taccgcccgagtagcgcttaggcgcgaaagggacggaagtacctccagtaagcgaaagctgaa |
| | | gtaagggaaatacggcaagactaacttgttagtcttacagtgtggataacctggtagttccccga |
| | | tcccccaacgggcctccaaggaatcgagaaccaaccctcattccacgtctgtagtaagcaaaaa |
| | | caggggcgatcttcaccgacacctctcaccacagagcacaccaacctctgtgaagccaatttcctc |
| | | gtccaaggacaggttattgagggtcaactttcttccgaccagaagaagggatttcctaccaaaaga |
| | | aaaaccaaatccaccaacaccacaaggtaaaacaacaacttgtgaagccaatacttagtcaaaga |
| | | ctaactattgagggtcaactttctcttcaatagagaagggatttcctggtaaaacaaataacaacaac |
| | | taacatcagcaact |
| 589 | Bat | gacaggtgttttggagggcggatgacgatatctggctggccaccagggaataacggcaaatgtct |
| | sapelovirus | gatcatacggttcacaagtctaccggcgatagtggttcaacaccatgtgtagcagggattcttgcgt |
| | | atgtgaaggcgacagtgc |
| 590 | Bat | taagcggaaagcattcttgtcccccggtcagtaacctataggctgttcccacggctgaaagggtga |
| | Picornavirus | acatccgttacccgcctcagtacttcgagaaacctagtacgcctgatgattccaaattggtatgatcc |
| | | ggtcaaccccagaccagaaactgtggatgggggtcaccattcctagtatggcaacatacaggtgt |
| | | ccccgcgtgtgtcacaggcccttacgggtgccatttcggatgagtctggccgaagagtctattgag |
| | | ctactgttgatacctccggccccctgaatgcggctaatctcaaccccggagccactgggtggtgaa |
| | | ccaaccacttggtggtcgtaatgagcaattctgggacggaaccgactactttggggtgtccgtgttt |
| | | cttttgttcatattaaactgttttatggtcacaacacaacttggtacgatttgtgattattcactgctcac |
| | | ttgtcacagtaaatatacacaatcatc |
| 591 | Bat | gggttttacgaaacccgtatacaccagaccttttctcccctccccctccacctaccttttccccctcttt |
| | Picornavirus | ggaccgaaacaaggacacgtaagtggaaacgcgattttatatgtggttggccaccacggaataac |
| | 2 | ggcaattgtctacatgtgggaagtgcaacctccctgccgataacccctgaccgggtgtgtaggat |
| | | aggaaaggtgcccactgtgggcgacaggttatggtagagtggatacctagccaggggcaatggg |
| | | actgctttgcatatccctaatgaagtattgagatttctctgctcattacccggtgatggttgtgtggggg |
| | | gggccccatacactagatccatactgcctgatagggtcgcggctggccgaccataacctgtatagt |
| | | cagttgaattcagccaag |
| 592 | Bat | gaaacccgtatacaccggaccttttctcccctccctctccacttacctttttcccctcttcggcatgaaa |
| | Picornavirus | caaggattattcaagtggaaacgcgatttaatatgcggctggccaccgcggaataacggcaattgt |
| | 1 | gtatctgctggaagccaagcctgcctagccgatagcccttgaccgggtgtgtaggatagcccagg |
| | | aaccagcaatacgcgacaggttatggtagagtagatacctagccaggggcaatgggactgcattg |
| | | catatccctaatgaaccattgagatactctggtcattacccggtgatggttactagaggggggcctc |
| | | tagtactagatctatactgcctgatagggtcgcggctggccgaccatgacctgtatagtcagttgatt |
| | | tgagcaat |
| 593 | Bat | acgaatcggtatacgcttcggtacctattgagcaagttcgaccctattacgatttgcctgcccgaatt |
| | Iflavirus | tgactcaaacaattgtgacatactatgtctctgatgaaagcactacacgagtagcgcccagcatgta |
| | | tgttttcaagtatagtataagtctgcctctatagtggattattgaccttaaagccagtcaaccatcct |
| | | atatgctgcatcgagacttgatgtcaatctgcctctactacgcaaatgtctagtaattagttataaggtt |
| | | ttactattaccctcataccaatatagtagtagtgtatgtgagtatcattcttactccgactgttaagaga |
| | | aaccaatttatagtcgttaaatatgataaatggaatgaatgatggtgtcatataaaaacactcactcta |
| | | taggcgtaagcattctcgctcttagagtcgtaaagaagaaatgccgtgtctatcagtatgttatgcga |
| | | tttattttctgccacgcgatctagtgcaatctagttgacatacagacattgcctaccactcgcgaggg |
| | | tcgaccggtagtgtaaggagtaagtgatgataccgcttattctgtaccattgcctggtgaggacag |
| | | atcctgactaatataaatataaatgaacactagatccaag |
| 594 | Bat | gtatagcaccggaatggtatatactactccaagtatacgtactaggagttaaaccctgtaatttacag |
| | dicibavirus | gggatttagtgactatatccgtaaaagtcgattggacgttaatcggtaacgaggccaagtaccgtg |
| | | aaccaatttaaaaacgtattactcatgtggtagaaccaacttggaaatagcatggcatataggagat |
| | | aggg |
| 595 | Betacoro- | gataaagtgtgaatcgatccgtagcatcgcaccctcgatctatgttagatctaatctaatctaaactt |
| | navirus | tataaaaacactaggtccctgctagcctatgcctgagggataggcgttgcatactagtgtcttagga |
| | HKU24 | atttgactgataacacttccctgctaacggcgtgagcactctcagtctaagcctcccacccatagga |
| | | ggtatc |
| 596 | Betacoro- | atttaagtgaatagcaggctatctcacttcccctcgttctcttgcagaactttgatataacgaacttaaa |
| | navirus | taaaagccctgagatagcgtattgagcacttgtctggtgggattgtggcattaatttgcctgctcatc |
| | England 1 | taggcagtggacatatgctcaacactgggtataattctaattgaatactattatcagttagagcgtcgt |
| | | gtctcttgtacgtctcggtcacaatacacggatcgtccggtgcgtggcaattcggggcacatc |
| 597 | Boone | tacgatcgctgtacattccactactgccaattagctccccatcccgttgctcccctctataaggaga |
| | cardiovirus | gccactcttgcaaaggtgaagccttcacccccggtcgaagccgcttggaataagacagggttattt |
| | 1 | tctcctctcctcggcgcttgcctcactaagctgaataggactatctattcaggcggatggtctggtcc |
| | | gttccacttggacagagtgtgtatctgggattccggatctcgaccacacactcaccagagctcagg |
| | | agtgattaagtcaaggcccgatctgcggcgaaaaggaaatgaagtattttgcagctgtagcgacct |
| | | ctcaaggccagcggataccccacctggtgacaggtgcctctggggccaaaagccacgtgttaat |
| | | agcacccttgagagcggtggtaccccaccaccctgcaaattatggatttgacttagtaactaaaaga |
| | | ttgacttggcatacctcaacctgagcggcggctaaggatgccctgaaggtacccgtgttgaaatcg |
| | | cttcggcgaccatggatctgatcaggggccctgcctggagtggttctatcccacacagcgtagggt |
| | | taaaaaacgtctaaccgccccacaaagaccccggcagggatgccggtaccatttaccaattcttg |
| | | acact |
| 598 | Breda virus | atcacctagtacttacaagcgggtcaaaccgccctccggaacggtcataaccccctcccgaacgt |
| | | gcgcttgacgtgactggtattcagtctagctactgagaaatactccggggttgtaacccaccatat |
| | | gacctttggtcagtaggtaacactccaaccaaacagcatctgacccacctccagcttgctgcaggc |
| | | catttggacCaaacgggttcagatatcagtggctaaacctctgacccacctccagatactgcagg |
| | | ccttttggactaaacgggtAcagactctagtggttagtattaactacccactgatagccgccaacc |
| | | tgatttttattgttacaaaattagtgatacacattattacttacggaggcagtagtaggagatgcaca |
| | | gtttttgctgataccaattatactgtgatttggtgattcggctaaggctgatttcacatacttagatgct |
| | | tgaagtaaccacacaacatctgattgataggtactaaggtaaagagatcaggaaaaaacatagg |
| | | cgcccatcagtggtgtctagattaattaatctggcaaacaagtatcaagtcatcgactccctaggag |
| | | tgagacttacgagtaccaattcgcctattaggccatccatataaaa |
| 599 | Bovine | gtatacgcccagttagttcaggtggacgtgtacgattgggtatcccaaattaataataggataggga |
| | viral | ctaaatcccctggcgaaggccgaaacaggttaaccataccatagtaggacgagcataatggggg |
| | diarrhea | actagtggtggcagtgagctccctggatcaccgaagccccgagtacggggtagtcgtcaatggtt |
| | virus 3 | cgacgcatcaaggaatgcctcgagatgccatgtggacgagggcgtgcccacggtgtatcttaacc |
| | | caggcgggggccgcttgggtgaaatagggagttatacaagccatgggagtacagcctgatagg |
| | | gtgttgcagagacctgctacaccactagtataaaaactctgctgtacatggcac |
| 600 | Bovine | ttttgcggctctgccgccgttcgggattacctgattcacagagcaaaacaggacctctagatcgtg |
| | rhinitis A | cttaaacgagatcatgctcgaactagaactataacgctggtcactggacccgtgccgcgccttgcg |
| | virus | gatctttgcgggaatggtggctagtgggctgtggaagtgactctaaccacacgcccctcaagtgtg |
| | | ggaaaacacgaactggtgtagcgacgacgataggccagggacaccctctccagtgatggagac |
| | | ccaaggggccaaaagccacgccttgtgccctgtcgttcacaaccccagtgcagttcgtgccagta |
| | | cctgcttttgggaagtgtgctaggacagctgaaaacagtcctagtgggagactaaggatgcccag |
| | | gaggtacccggaggtaacaagtgacactctggatctgacttggggagagcgggtctgctttacag |
| | | acgccactctttaaaaaacttctatgtctcgtcaggcaccggaggccgggccattcattaaaacaa |
| | | tacacttt |
| 601 | Bovine | ttggatctgagcaggggccccctagggttgattacaactcaactgggggttaaaaaacgtctaac |
| | picornavirus | ccgacacgccagagggatctggtaccattatttcattactcaccactggatgcagattgacgataa |
| | isolate TCH6 | acgttgttgtttgtgactattgacttgatctgatctacgggatactacactgttatacttcttgctttgat |
| | | ggtgttcactgtactttgtctccttctacatttcaca |
| 602 | Bovine | caccaatagattagtcaagctgtctataggcataaactaacccccaaccccattaccccggggcca |
| | nidovirus | ggtgggccgccgccttcgggcaaacccgtgcgctggtataatcaaggttcacagccagattcact |
| | TCH5 | gccggttagctagtggggcggtagcctggcaaaacccgaagaggttggaaagggaacttcagg |
| | | gtagtttatcctaggctagcgtagctacagttcggtcaagataaccgtcctggtgctagggctagta |
| | | gagacagtggtaacttggacaagggtccagggccactttagggaataccctacggaaggctagg |
| | | tccgtaaggaagacccccgcagagtccgcggttgagcagagctcctgcgtagacaaaaggcaa |
| | | aaagtggattacattcgcctgcaggaaaaggcaaacgtcgaggagtcggagctaaagtactgga |
| | | cgattgataccacgcctgctgcggtagataaa |
| 603 | Bovine | ccatcgacactccaggctcacggattaagttaggttccgccgaagcgggctaaccaggcccctag |
| | hepacivirus | taggaggcgcctatcccgtgagccattccccacggattgagtggagctggagctgggaaggac |
| | | cgagtacggtccaatcgagaagaaccctgatgaacattccaggcctatcggtagataggatatat |
| | | ccaccagtgaaggcggggtcgtgggtacaggccccctagtccacacagcctgatagggtcctgc |
| | | cgcaggatccgtgggtgcggctgtacatgtacc |
| 604 | Botrytis | gccccgccgaccacctatttatactaaataggaaggtcccgactagtcggataattcggataacg |
| | cinerea | aattatggttagatctattaaagttaaaatagattgaatactactcatcctccttattcctatactaggga |
| | mitovirus | gtaaatgacaaatgtctatcctcaaaccgaaatggcttaagtgatgaatttgaaagaaaggtaggat |
| | 4 RdRp | taagaatataaggcatcaatatattatacccttgaatgttaagtgaccacggcgtgacgattagggct |
| | | atcttaggatagacagccatctaacgcgacagcagtggaaatcagcttagcatctcaagatcatgta |
| | | taatatatacataaccttacaattataaaaccaaaccaaaacacactataatatatataaattatagaa |
| | | gtatcggacctggacggtacctactattaactgatagtagccaaatgcaggaagctc |
| 605 | Botrytis | ggaacttttcagttccagaagtggattattaagcatcaaagatacactttgaacctgcgattaattcc |
| | cinerea | ccatagtgactcttgttactgtgaattaggaatagagtagttcaacttctaatgaggtgaacaatataa |
| | mitovirus | taactcatcttattaaccctatacgtagacaattgtccaaagagacagaggaattctgccaatctgga |
| | 2 RdRp | atgtttggtacgcgtagaagataataagagaccctctattcccctgcctcatgactaagtcatggccc |
| | | ggggtgtaatagagatacttttatatattatacaatc |
| 606 | Canine | cgctctttatacaaatctgtcaaccctagtataactctaagccgaacaattatagctaggctattattat |
| | picodicis- | ataacattaattaggcattagcgagtcgccaatctcaggtaatcctaaggataccatcctgagacta |
| | trovirus | agatgaagcgccttcggttaccgatgcccggtgtccacgaagccatcgtggtcggccgcgtcccc |
| | strain 209 | cacctctcccaacttggactccatgattcagtaggtgtaatgattagtattattgattctgctcgttcaat |
| | | gtgtttatcttcacgatctgggacccaacacatgcttcactcatgataaatgaggaccctcattaga |
| | | agacacccaaaccatagagtgcgagaatgaggatactacttccattctggtaacagaaatgaattc |
| | | ctgcgtgtgtctcgtaaatggaatattaagaacttcagataaatcgaacaatacactaatacaagag |
| | | ttttctaccaacatgacaatgcggctaatctgaccgtggagctgtgaagcgctcaaacccgagtga |
| | | gtatacagtcgtaatgcgtaagtccatgaggaaccgactactgttacctctgaggtgtgtactcatt |
| | | CCtctcttttattattatttgttattgcaaatactacaactttgatcaac |
| 607 | Canine | accagacaaagaggctaaggatagttaaattattgaatatatattaaaaacttagggtcaatgatcct |
| | distemper | accttaaagaacaaggctagggttcagacctaccaat |
| | virus | |
| 608 | Canine | tttaagtgagtgcccaatctcttgactcctgctggaaccaccgaccagtagtgtccaaaatgccagg |
| | kobuvirus | tggaaaatcctccatcccctctgggcttcatgcccggcatcctccccccagcctgacgtgccaca |
| | | ggctgtgcaaagaccccgcgaaagctgccaaaagtggcaattgtgggtcccccctagtcaaggc |
| | | gtcgagtctttctcccttaaggctagtcctgtcagtgaactctgtcgggcaactagtgacgccactgc |
| | | atgcctccgacctcggccgcggagtgctgccccccaagtcatgcccctgaccacaagagtgctg |
| | | tctggcaaacattgtctgtgagaatgaccgctgtggctgccaagcctggtaacaggctgccccagt |
| | | gtgcgtaaactcatccagacacggtctggcaacagctgaaagacatggcgtaaggggcgtgtg |
| | | ccaacgccctggaacgagtgtccactctaataccccgaggaatgctacgcaggtacccctggctc |
| | | gccagggatctgagcgtaggctaattgtctaagggtattacatacccaccctcacacttgacata |
| 609 | Camel | cttaagtgtcaatctatctatagatagaaaagtcgctattagactagtgtctactcactcaactaaac |
| | alphacoro- | gaaatttttgctacggccggcatctctgatgctggagtcgtggcgtaattgaaatttcatttgggttgc |
| | navirus | aacagtttggaaataagtgctgtgcgtcctagtctaagggactgtgttctgtcacgggattccattct |
| | | acaaacgccaactcgaggactgtctcgtgatgtgtggaagcaaagactgtcatgtggaaaccag |
| | | taactgttccta |
| 610 | Cripavirus | gcaaaatcggtagtacgaaaacgtacgaccaccgatgagactgaaatgacactagagagattatt |
| | | tcaatatcctagtgaataaagtcaatatagaggagatcgatcgtcaatcgatggcgctgacagcc |
| | | ggaaagacggcaataataaaaaccaagatttagtattaagattgattgaattgcaaaagctatcag |
| | | aatagacaatcaaaatattaagtaaagcaaaagcacttaaagaagacaatataaattagttagtaac |
| | | caaacctcatcgtgcccctaagggaaaccggaacgtaaaagcgtagaggtattaaggtcactgc |
| | | ggagacctaaaatccgcaatatatgattgtaatgattagaatagacttagatgtaactataagagat |
| | | ataaatacttgtttcaagatttatagacaagatctgatcctatggattttagataaccttcatgttagtgg |
| | | atagtgtgtgtacctatctaaacgcataaggctcaatacatatttaaagtaggactatgtattacggc |
| | | gcatctaacggtaacgttagtcaagaccggagaatctcggaatgaatatagtaaacccaaatttata |
| 611 | Human | acctagtgcgcctgattatatccccaccccgagtaaacgttagaagttacgcaaccccgatcaata |
| | coxsackie- | gtaggtgtagcactccagctgcatcgagatcaagcacactgtctccccggaccgagtatcaatag |
| | virus | actgctaacgcggagaaggagaaaacgacgttacccggccaattacacgagaagcccagtagt |
| | A2 | gccgtgaaagagcggagtgatcgctcagcacacccccgtgtagatcaggctgatgagtcaccg |
| | | cgatccccacaggtgactgtggcggtggctgcgttggcggcctgcctatggggcaacccatagg |
| | | acgctctaatacagacatggtgcgaagagcctattgagctaaaggtagtcctccggcccctgaatg |
| | | cggctaatcctaactgcggagcacatgccctcaaaccagggggtggtgtgtcgtaacgggtaact |
| | | ctgcagcggaaccgactactagggtgtccgtgatctattattcaataatggctgcttatggtgacaa |
| | | ttaaagaattgaaccatatagctaaggattggccatccggtgactaacaaatcgctcatataccagt |
| | | ttgttggttttgttcccttatcacatacagctcataacaccctcaatatttactacaattgaatagcaaga |
| | | a |
| 612 | Coronavirus | agaaacaagtagtgttttaaaaaccacaaattagtgcctgtaacatcatgcaatgaaagtagcgctc |
| | AcCoV-JC34 | actagcctctatgcaaagaatgaaaaagaaatacgaagcatttaaagaatacaatctatctaggata |
| | | ggtacaaactcctccccctcagacacggtcaactcaactcaactaaacgaaatcccccagcatg |
| | | gttccgacccgtgtaaggagtgtatacgtgcagtcgagcccttactagtgtaagcgtaacggcatc |
| | | taggtttgcacgtcaggaggaaacggtgtgtacgtactagtgatacgccgtatcggttccggccc |
| | | gataggtattgcattagacgtcctgggtggactgcctgcccttgtgtgattcggctgaccgtcagttt |
| | | ggtcacctcacacgtccttaagac |
| 613 | Chicken | gggtatggtggaaaccccgtccactgggcatcatgccctctcagaagtggatcaatccaccccaa |
| | picornavirus | ctccccccctggaacctgagccacagtggactccggtgacgaagctagggaccccaatacctca |
| | 3 | agtgccaagagagtccccccctcgcgagaggtgctcagggcccaaaaggctagttggcagagt |
| | | gaagtgaaggaagctgctaacgtggtgaccttaagcgtaattcgaagctgacctttgaggttaacc |
| | | ctagtggaccactggaggaatctgtggaggtggtggttaggaaagttggccacttgtgagtagatg |
| | | cccagaaggcataaggctgatctggggccagtgactataccgaccggtaaacctggtataaaaa |
| | | ccatgaaagcaagtgggtgaaattactctattatccacattcagcagagatattggcaaa |
| 614 | Chicken | gtggccgacagcagaacacctaccgaaccaccacctcacccccataactccaccctctacacct |
| | picornavirus | tccgctatggtggaaccactgcatattgccagactgagaatggccaccccctcgacacctgcccc |
| | 1 | ctactgccccaccgcgcaaccattgcagtccactcggaggagaggcatgggggccccgacat |
| | | atccccagtccagaggtgaccaccccctccccgtccggtagatggtccagagggctagccgac |
| | | gccctctatgatgcagcagtctacctccgtcagcgcgagcatgcacagtcgagcccacggaaa |
| | | cacagcctagcattgcactctcaccctgcgtaccctgggcgccaccgctcgagattcgcatgac |
| | | gacaccctggcgtccccccaccgctacgtgatatactcgtggcatacaccgccctggcgacagt |
| | | acattccactgcctaatagggtggcctccctcaatctcccgcaccccccattgcgcacgtcatcac |
| | | cgccgccgctaacgcgatccggcgcggactcactggcactgtcccctcgtccgccgggtacca |
| | | ctcatggttggcttttcacttaactggaactggtgaccatcctacacatgatggtcgccatgaccat |
| | | gac |
| 615 | Chicken | aaaccctcacgagtgcagtggtaggtcccaggccaatattcacgtaaggcaggaccaattacca |
| | orivirus | ccactcgtgtagggactggcctatggtacccagaggggcggtagggggaattaactccccctcc |
| | 1 | cctgtggtcctataccaccccacacctctgtgggcatcatactatcacttgattccgactataaaca |
| | | ctaggcaggcgcgcctagtcatacaccgcccggctggtctaccagctcagtgggcggtgcgcg |
| | | ctggtccatcgtgcccagcgacatagcaccagtggacacctccgaacgccctcccctgtatggg |
| | | gtggtgcccaggggatcagtgtggtgacacactccctggggcccgaaaggctagtgtgcaacag |
| | | gtgaggtacagccagctgcccccgtggctggagggaccaagcagtgaagcacacctcaccact |
| | | tgggggtgggctagtaagtggtgaaagcatagtgtccgtgtcgctggccaacactagggtcaagt |
| | | ccagccactcagtgagtagatgcccaggaggtacccctagtggatctgacaggggcctgttactt |
| | | aatgcaggttaaaaactatgaaagctgagtagtgtagcccggctggtggcactcaccaattcattc |
| | | tatttt |
| 616 | Chicken | ggttaacttgataaccaaggcaccgtgcagggcagcacgttaggagacatgagattcatgctcc |
| | gallivirus | aatgcccaaaactagtgtgatgatatgtctacccaaagtacccccaaggatcggtactcaaacct |
| | 1 | taattcctagtcccatcattgggccaagtatctaggaaatgtacccgtgccagacgaacgtaagaa |
| | | agctgtcttttattgaacggactaatgaactaagtataactggctcgcgccacctggtgtgtgccga |
| | | ggaattcccccatggtaacatggtccaacgggcccgaaaggctagtgggcaatcggtcctccaa |
| | | ggaaggggacccaccccgacctgaacaggatagatgaagctcacctcccaggctcctaacccc |
| | | aaggaagttttacttatagtaattagaaatagtatgtaattgctggcaatcagctagtagtcaggaacg |
| | | ttatgaccaaatgagtagacccccagaaggtaccccattatatgggatctgatctgggcctcatact |
| | | gtgtgtctccccacatatgaggaaaaaccatgaaagtaggtccaaaatattataccattatcattct |
| | | ttagtggtgacgccattatatcagcagtagctg |
| 617 | Chicken | ggtgcatcatcactgaacaccctcgggcagagatgcaagggtggaagtcactcctgccccctgg |
| | calicivirus | caacatgcaggtgcccgatcccaagcttagactgacacctctcctgggtggtgcaacactccaag |
| | | gttgatgaacaaacctggagggacctctgggcaacctggtctctcgaggatctccggcgcatctcc |
| | | acagactacctcatgctcccggaacctgagaagaacactgatgcctatgatggctggctgatggtc |
| | | ggcgagatgagaccatgccggtctcattggctgggagg |
| 618 | Carp | agctacaggaaagagagagataatcacagcacataaatacaactacagaagagagccatccctg |
| | picornavirus | agcactatttacagcaaaccacgctgggaaaagtggtagcatgacccacttacgggaacttagtat |
| | 1 | aggattttaatatcttcgattcatattactatcaaactaagacgcccggacatatccgtgattatata |
| | | gtttaagcaaaattgagtaactaagtattaacctgccaaatggtgagaagtaactctgtgaaaatacc |
| | | atttgtgcatgaaattgtcagaaaactcaaggcattggggggtcccactgctgatggaggactatt |
| | | gacagactctattgtagagagtagtgactaatgataacgatagcgtattacgcaatgggctgtacc |
| | | cgttagatttagtatgccggggggaggggtcccactggattgcactatgtaacctgacagggcgtc |
| | | tgccgacgcactacaatgaggataagatcggctgatttata |
| 619 | Falcon | cgcttggaataagagagaggaattatgcatgctagagtgatgatacaactaattgactaatccaa |
| | picornavirus | gtgaagctcacgcaggggcggcacgacacagccgtaattcactaccgtccctccacaccagtg |
| | | gatgaagggccggatgtgtggcctctggctaacccctctctctggggtgatgctactggatgatta |
| | | ctcctagaccaaatcacatgaactcctcagatccacacggtggggctatgagcctgcggattaata |
| | | gctggcgacagctaccccaggggccaaaagccacggtgaagcagcaccctcatagtctgatgc |
| | | ccaagggctgatgttgggagctagtagtgtgtgtctggcctatgataggacactggccaagcgca |
| | | gaggagtggggctgaaggatgcccagaaggtacccgtaggtaaccttaagagactatggatctg |
| | | atctggggccccctcacgtggcataccacgtgagggggaaaaaaacgtctaggccccaccagc |
| | | ccacgggagtgggctacccaaaaaagcccaacaatatttatggtgacaattcactgatcactagc |
| | | aatttttgtattcaggactccaattattgatgcagatatagtggacattcagattcaaatacaaa |
| 620 | Equine | cgacaggcacaggtcgctccgagactagtagtgtgggaacttgaactactgatgaaacgaggta |
| | rhinitis B | gtgacactcagtacctgcgaacgaggtcggggccctcccacaccacacccaactacactatcgt |
| | virus 1 | tccactttagcaggggtcactactatccccctggcggcattggaactagccgtcgcgtcaaacgc |
| | | gcagccctgaaggccccacaccagtggatcagccgtgggtatgatctggcatgtgatctcaagc |
| | | ctgcaaccgaagccgaacagccacatgaacagatgagcgtggtagcgctgtgtgagttggcggt |
| | | ggatccccctcgtggtaacacgagcccccgtggccaaaagcccagtgatacagcacctctcaca |
| | | tccaggacgaccccatcctggcgctcactcaagtagtatggcttagtacgcattaggtggtaagcc |
| | | gagactccctcggccagactgaatgcacacatgtctaggggctaaggatgtcctacaggtaccc |
| | | gcacgtaaccttcagagagtgcggatctgagtaggagaccgtggtgcactgcatacagatgcag |
| | | cccggataaaaagcgtctatgcccctacagggtagcggtgggccgcgcccatccattaaaacta |
| | | cttgttct |
| 621 | Equine | aagggaactgctcgtaatgagagcacatgacattagccaagatacctggcaattgtcacgggag |
| | rhinitis A | agaggagcccgactcgggcacttactctcaaacaatgaggcgcgcctcggcgcgcccccccat |
| | virus | ttcagccccctgtcattgactggtcgaaggcgctcgcaataagactggtcgagcaggcttactatt |
| | | gtttcaggcatagcgcgcccagcgcggcgggccgtcaagcccgtgtgctgtacagcaccaggt |
| | | aaccggacagcggcagctggattacccggtgccattgctctggatggtgtcaccaagctggcag |
| | | atgcggagtgaaccaacgaagcgacacacctgtggtagcgctgcccagaagggagcggagct |
| | | cccccgccgcgaggcggtcctctctggccaaaagcccagcgttaatagcgccactgggatgca |
| | | ggaaccccacctgccaggtgtgaagtggactaagtggatctccaataggcctgttctgaactacac |
| | | catctactgctgtgaagaatgtcctgaaggcaagctggaacagccctgatcaggagccccgctcg |
| | | tgactctcgatcgacgcggggtcaaaaactgtctaagcagcagcagaaacgcgggagcgatcat |
| | | ttcctcatttgtttc |
| 622 | Equine | gctcgaagtgtgtatggtgccatatacggctcaccaccatatacactgcaagaattactattcagtg |
| | arteritis | ggcccctctcggtaaatcctagagggctacctctcgttattgcgagattcgtcgttagataacggca |
| | virus | agttccctttcttactatcctattttcatcttgtggcttgacgggtcactgccatcgtcgtcgatctcta |
| | | tcaactacccttgcgact |
| 623 | Enterovirus | actctggtatcacggtaccatgcacgcctatatataccccaccccatcgtaacttagaagcaacaa |
| | sp. | acaaactgcccaatagcagcacaacacccagagtgaaggggcaagcacactgatccccggaa |
| | isolate | gggtctgacggtatgctgtacccacggcagaagtatgacctaccgttaaccggccatgtacttcga |
| | CPML | gaagcctagtaccattatgaaggagattgatgaacgctccccagcaaccccagctggtagactg |
| | | gtcgatgagtctcggcattccccacgggcgaccgtggccgaggctgcgaggcggccagcctac |
| | | accatacggtgtaggacgtcaagatactgacatggtgtgaagagcctattgagctacgtggtagtc |
| | | ctccggcccctgaatgcggctaatcctaactccggagcatccgccagtaagcccactggaagggt |
| | | gtcgtaatgcgaaagtctggagcggaaccgactactagggtgtccgtgtacctgattacttattga |
| | | tggctgcttatggtgacaacttatagttatcatcataagctacaggtcagccaaccggagaattata |
| | | ggttatttgttggtttcataaacctacagtcgtattacctgtcaattaattgactcaaaattaacaaca |
| 624 | Enterovirus | taccgctgcaccagtgagctggtacgctagtaccacgcacggagtagatggcatcccccacccc |
| | AN12 | gtaacttagaagcaaagtacacatctggccaatagtggcgctgcatccagccgcgcaacggtcaa |
| | | gcacttctgtttccccggtccgcaagggtcgttatccgcccagtccactacggaaagcctactaacc |
| | | attgaagctatcgagaggagcgctcggccacgaccccggtggtagctctgagtgatggggctcg |
| | | caaacacccccgtggtaacacggatgcagcccgcgcgtgcactcgggacagcctattggttgtt |
| | | cacctcaacatagtgtaaatggccaagagcctactgtgctggattggattcctccggagccgtgaa |
| | | tgctgctaatcccaacctccgagcgtgtgcgcacaatccagtgagctacgtcgtaacgcgtaaga |
| | | ggaggcggaacagactactacggtactccgtgatcattgattatatgaatatatggtgacaattgc |
| | | tgagatagcgaattagcgactctaccgctgaacattgccctgtactacctaatcgcatacacaaaa |
| | | cctcagagataccaagctcaacattgatctgcagattcctgaatctcaaatataaattggaacaagc |
| | | aaa |
| 625 | Dolphin | accagacaaagctggctaggggtagaataacagataatgataaattatcatacttaggattaatgat |
| | morbillivirus | cctatcaaaggcacaggataggataaaggacacagtc |
| 626 | Dianke | tgttttcaaccataatactactactacaagtataaaaccccgtccgtctgtcggagacgctaaactctg |
| | virus | accaccaatctagccacatcagagcttaaagaacctcagagacactctcccacttaacatcattag |
| | | gaatcttcgatgctacaacaacaggctagtgaacaataaatccgtacaattcacagagtaagagg |
| | | ccataggtccagactagaaaggtagtactattgaacaaatacttagattaacagaggctataaata |
| | | gtgctcatcacgaaacagagtaaccagtgcaatagtatgagcagagtaaaacgtcagatacgac |
| | | acc |
| 627 | Guereza | cactcaatactacactccgcataggggagaagcgctggcgacgcggaaccgcgttaaccatac |
| | hepacivirus | gcgtagtacgagtgcgacagaccccggtgctactggtggtagcgagacacgagccgaagtctgt |
| | | ggggggaactccacttagagggcatgcccgggcgtaggcttctgagagggatgggccccaact |
| | | tggcccctgagtgggggggtgttacgacctgatagggtgcgggctggcgcctaccactaccagt |
| | | cgtacatgagtc |
| 628 | Grapevine | gcccggggggtgcagtcctgtgaaagggtctgcaccatactatatatgtatatgattacatcccaaa |
| | associated | aggcgacttcgttcaggattaaatctgacgtaggtccagtaaataagcatgtcaaaacatgtaagat |
| | narnavirus-1 | atcctgtaatctactctcataagatgagataagatgatattgcagacccatgtaaataaatccattatg |
| | | aattcattcatataaggtagaagtggtaactatggagaaacattaatataaaacggtcattagcatga |
| | | acgtcattaaggaactggcataccaatgtctatttagtgactatgatatttagagtatcccttatattaat |
| | | taacaattattccattagcatatcatccgacaacaaatataaaagaagaaatattactcattaaaa |
| 629 | Goat | gtacttacaagcgggttaaaccgccctccggaacggttacaaccccctcccgaacgtgcgcttga |
| | torovirus | cgtgactggactcagtctggctactgagaaatactccagggagtatcccaccatcttgacctctgg |
| | | tcattaggtaacaccataaccaaacaaactctacacacctaacccacctccagcttgctgcaggcc |
| | | ttttggactaaacgggataggtgattgtgaccaactcgtctacccacctccagattactgcaggcct |
| | | ttttggactaaacggCatagacttagtggttagtattaactacccactgatagccgccaacctgatt |
| | | ttcattgagtaaaattagtgatatacactattacatacggaggcagtagtaggagatgcacagttt |
| | | ttgagataccaattatactgtgatttagtgtattctgctaaggctgtatatacatacttagtaggaga |
| | | agcaattatacaacatttatattgatttgatactaaggtaaagagtcttaggaaacaccatagacgcc |
| | | attcttgtggtgtctagaccaactaatctggcaaacaagtaccaagtcattgactcactaggagtga |
| | | gacttacgagtaccaatttgcctatttcggacatccatataaag |
| 630 | Foot-and- | acaagcttgacaccgcctgtcccggcgttaaagggaagtaaccacaagcttacaaccgcctaccc |
| | mouth | cggtgttaatgggatgtaaccacaagatacaccttcacccggaagtaaaacggcaaattcacaca |
| | disease | gttttgcccgtattcatgagaaacgggacgtctgcgcacgaaacgcgccgtcgcttgaggaggac |
| | virus O | ttgtacaaacacgatctaaacaggtaccccaactgacatacaccgtgcaatttgaaactccgcctg |
| | isolate | gtctttccaggtctagaggggtaacactagtactgtgcttgactccacgctcggtccactggcgagt |
| | | gttagtaacagcactggtgcttcgtagcggagcatggtggccgtgggaactcctccttggtaacaa |
| | | ggacccacggggccgaaagccacgtcctgacggacccaccatgtgtgcaaccccagcacggc |
| | | aacttttctgtgaaactcactctaaggtgacactgatactggtattcaagtactggtgacaggctaag |
| | | gatgcccttcaggtaccccgaggtaacacgcgacactcgggatctgagaaggggactggggctt |
| | | ctgtaaaagcgcccagataaaaagatctatgcctggataggtgaccggaggccggcgccatcc |
| | | attataactactgacttt |
| 631 | Feline | acttttaaagtaaagtgagtgtagcgtggctataactatcattactttaactagccagtgctagatttg |
| | infectious | tcttcggacaccaactcgaactaaacgaaatatagtctctctatgaaaccatagaagacaagcgag |
| | peritonitis | attatttcaccagtaggcaatcactcctaggaacggggagagagaacggcgcaccagggaccg |
| | virus | tccctgtaggtaagtcgtctagtattagctgcggcggaccgcccgtcgtagttgggtagaccgggt |
| | | tccgtcctgtgatctccctcgccggccgccaggaga |
| 632 | Farmington | acgacgcataagcagagaaacataagagactatgacatagtcaccctgtattcattattgactatat |
| | virus | gacctattattagaccatcacgggtaaatccactcatgcagactcgccaagtacctccaaagtca |
| | | gaacg |
| 633 | Avian | acttaagatagatattaatatatatctattacactagccagcgctagattataacttaacaaaacggac |
| | infectious | ttaaatacctacagctggtcctcataggtgaccattgcagtgcactttagtgccctggatggcacctg |
| | bronchitis | gccacctgtcaggtattgttattaaaatcttattgagctggtatcactgcttgattgccgtgtctcacttt |
| | virus | atacatctgagcagggctacctagtgtccagcgtcctacgggcgtcgtggctggttcgagtgcga |
| | | ggaacctctggttcatctagcggtaggcgggtgtgtggaagtagcacttcagacgtaccggttctgt |
| | | tgtgtgaaatacggggtcacctccccccacatacctctaagggcattgagcctagcgagggctac |
| | | gttctcgcataaggtcggctatacgacgtagtagggggtagtgccaaacaacccctgaggtgaca |
| | | ggttctggtggtgatagtgagcagacatacaatagacagtgacaac |
| 634 | Human | ttaaaactgggtgtgggttgacccacccacaccacccaatgggtgagtactctgttattccggtaac |
| | rhinovirus | tttgtacgccagtattccctcccctccccatccattacgtaacttagaagattaaatacaagaccaat |
| | 1 | agtaggcaactctccaggagtctaaggtcaagcacttctgatccccggttgatgagatatgctcca |
| | | acagggcaaaaacaacagataccgttatccgcaaagtgcctacacagagcttagtaggattctga |
| | | aagatctaggaggtcgttcagctgcatacccagcagtagaccagcagatgaggctggacattcc |
| | | ccactggtaacagtggtccagcctgcgtggctgcctgcgcacctctcatgaggtgtgaagccaaa |
| | | gatcggacagggtgtgaagagccgcgtgtgctcactttgagtcctccggcccctgaatgcggcta |
| | | accttaaacctgcagccatggctcataagccaatgagatatggtcgtaacgagtaattgcgggatg |
| | | ggaccgactactagggtgtccgtgatcactattcattattaattgcttatggtgacaatatatatattg |
| | | atatatattggcatc |
| 635 | EV22 | ccttataacccgacttgctgagatctataggaaaaaaccattcccagccaggggtggctggtcaa |
| | | taaaaacccccatagtaaccaacacctaagacaatttgatcaaccctatgcctggtccccactattc |
| | | gaaggcaacttgcaataagaagagtggaacaaggatgcttaaagcatagtgtaaatgatatacta |
| | | acctgtattatgtacagggtggcagatggcgtgccataaatctattagtgggataccacgcttgtgg |
| | | accttatgcccacacagccatcctctagtaagtagtaaaatgtctggtgagatgtgggaacttattgg |
| | | aaacaacaatttgcttaatagcatcctagtgccagcggaacaacatctggtaacagatgcctctggg |
| | | gccaaaagccaaggatgacagacccattaggattggatcaaaacctgaattgagtggaagatatt |
| | | cagtacctatcaatctggtagtggtgcaaacactagagtaaggcccacgaaggatgcccagaag |
| | | gtacccgcaggtaacaagagacactgtggatctgatctggggccaactacctctatcaggtgagtt |
| | | agttaaaaaacgtctagtgggccaaacccaggggggatccctggtaccattattgttaatattgaca |
| | | tt |
| 636 | Human | tccgacgtggaggaattaacatcattccgacgaaagtgctattatgcctccccgattgtgtgatgctt |
| | TMEV- | tctgccctgctgggcggagcgtcctcgggttgagaaaccttgaatcattcctaggagccttggctc |
| | like | ccccggtctaagccgcaggaatatgacagggttattaccaaactattatactactacatgggact |
| | cardiovirus | atccatgaaaagggtatgtgagcccatccactaggagaatctgcgcggcggtctttccgtctctc |
| | | aacaggcgtggatgcaacatgccggaaacggtgaagaaaacagattctgtggaaatttagagtg |
| | | gacatcgaaacagctgtagcgacctcacagtagcagcggattcccctcaggcgacaagagcctc |
| | | tgcggccaaaagccccgtggataagatccactgctgtgagcggtgcaaccccagcaccctggttc |
| | | gatggccattctctatggaaccagaaaatggattctcaagccctccggtagagaagccaagaatgt |
| | | cctgaaggtaccccgcgcgcgggatctgatcaggagaccaattggcagtgattacgctgccactt |
| | | tggtttaaaaactgtcacagatctccaaaccaagtggtcaggattccaattagttgactgacaat |
| 637 | Human | acttaagtaccttatctatctacagatagaaaagagctattagactagtgtctactatctcaactaaac |
| | coronavirus | gaaatttttgctatggccggcatattgatgctggagtcgtagtgtaattgaaatttcatttgggttgca |
| | 229E | acagtttggaagcaagtgctgtgtgtcctagtctaagggatcgtgaccgtcacgagattccattcta |
| | | caaacgccttactcgaggaccgtctcgtgatgtgtggaagcaaagactgtattgtggaaaccagt |
| | | aactgttccta |
| 638 | Hubeizha- | gtgcaggatggcctttcccatcttaagtggtagtaggatttcgtgggtccataccccccgatttcttg |
| | ovirus- | gtacgtattccatgcacggagaatacgaccaaaactcttatttcaaaaaatattattattactcagtgg |
| | like virus 1 | gctgagtgcgacccaccagaccagcttagcaacctggaagttgaggagatttatggaaccaaatt |
| | | acacatgcgtggagtgccgccactccgtatctgacactcattacgcgattaagactgcgacgaga |
| | | cgagcgaa |
| 639 | Hubeitombus- | ggaccatccaggcaggtgtaggctagtaccctcacctgacctgtcgcgatgatggctttgtgagg |
| | like virus 9 | cttgtgggaggatcccaggcccatgcattgctgctgtcatcgtgaaaaatgagtatgctcgcacct |
| | | ggcgtggaggaaacggcatttgacggatgctaaggaggatttgaaggtcctcaactcccatgcctt |
| | | attacaagtcccattcatcaagcttcgagcccacgtctgtgacgagcagaggtgaggaggagtc |
| | | aagaggagtcctattcaagctgacgcagcaagaaccataaaactacattgctcaatgggcaaga |
| | | gcggctaaggctcggactcgtagcacgacagtgtgagcggagccctgtaaatgtcgcggccctt |
| | | catcggtggatgcatcggagataagaaaattggcatgaacttgctccaggatcgtacgtgatcgat |
| | | gaggagttgaacttagtaggaaccaacgtatgagcgtatggtgtccgaaactaagaagcaattcc |
| | | gtcatcgggcacgtatggaatactacaacgagaaaaaatgccttgaaaagatccactaggaacgc |
| 640 | Hubeitombus- | ttcgggatacccgcgtaagcggccacactgactggagtcggtgagaatttgtataccagatgagg |
| | like virus | agacgttaccaccgtctcggcagtgctacgtctgggaaaggactgtgatagtggacagtcctacc |
| | 32 | gtctttagatacattgcgagtgtatagcccgggagggattaactaatagcaacgcaatgcacacgg |
| | | cggttcggatttgcttgactgatggaaagacatctaagactaattgaacc |
| 641 | Hubeisobemo- | gagatgatgcgtgggccgttgcgctgcgggcggcccacctccctacggggaccgtgagacacc |
| | like virus 3 | gctggggaaggcccccacccccggccaaggggatcctgccgagaggcaggagaaagaggcc |
| | | cagccctctggggcgcattaggggTgcctgggagggaagtacccgagccgggcggccggtc |
| | | gggtgcggctgtgcagttcgaggctaaccgtaaggaaggcctgagctgcctcggcttgtcggaa |
| | | aggaagacgaaggcacttatcaaggattcaggaagcaggagcgcaattacagcgcgcgccgt |
| | | gcggcctggattaaccgcatttggccg |
| 642 | Hubeipicorna- | agcaacttctactgaaaactagctagagttcgacgatctctctggctaatgacaaataaccaatcaa |
| | like virus 2 | aaagtcaaatgttcatgtatatatatatttagtagtgacctttatttagaaaaactttagatgatttatcgtc |
| | | aagttgccctagtgaagcgatcagctattatatcgatcatttagtatacgtcttaattgacgagtaag |
| | | tacgttttgcatacctcacattgaggatagtatcgtacctgactaagaagttaaactagtctaccaata |
| | | gcaaccatataggatatagattgataaacaaggataatctgatcaatgctcagcttacggtgatta |
| | | tgtatagaaaaGtattataaaaactacataattgtcaaaagaaaaagcgttacgtactgacgcataa |
| | | tgttcacagtgtgacacaaaccactatattagattgtaaaataggctagcctgaccatttatcaaata |
| | | caaactgatcaaacgcctctccgagccataaggccgacgcgaatcgacataacagggtgagat |
| | | acagctgcagagcagccgaggatccacttatagagagagaattactcaaacgaaattagaagtc |
| | | acttctacacagaaagtctgagtaggcgttatccaaacgtaaa |
| 643 | Hepacivirus | acatgggggggggctgacagtgagtacactgtgccaagcaggtgctacgctatgcctaggtgct |
| | P | gctgtaggccaaggacatgtcccagtcatcccaggtgagggggggggacccctcaccgctgcc |
| | | actgcctgatagggtcctgccggagggtctcggtgtccggctgtac |
| 644 | Harrier | gatgtgtgacggtgtaattactttccggatcccactttcctattataactctttcatcccaaggttaggg |
| | picornavirus | aaagaacctggctcggtaccaccagaccctccgccacgctagtggactctccggagataacggt |
| | 1 | accccctagtagtcacctgtgctggtgaagaaccacctagtattgcagggtgcgtgccgcctagct |
| | | tccatttcttctggagcactgtgcaatgaggtaccccacaggtaacaagtgcctcaggtcccgcaa |
| | | ggatactgtggggtggtgtgaccgcagggagctgtctccacggctcctctaatgttacgccgctat |
| | | ccacaggccagtgcgtgtcatcgatcccggatgacagagctagtattgcgaacccccaagtaaga |
| | | aaagtggctagtaacctgatagctggtgaagagggtgggtcagttgagtagatgccctagaggta |
| | | cccgaaaggatctgactagggacccgtgactatacattaggtaaaccgggtataaaaaccatgaa |
| | | aaactgaccactatcattaacctcactactattatgtgtgaaagtgattgagtaggactgtaccag |
| | | cccgcctttcttggattttctctatcgctcttcttacacctactgttatcaaggcactctttagagata |
| 645 | Kunsagivirus | tttcaaatcggactccggtagttataccggagcccggtaggacgcagggccgcgttaacagccc |
| | 1 | cccaccccatcccactgactgatactcggattggactcatagcattgctaactctgattctggatac |
| | | cccgtttatgtcgtcgcggtcggaagtgcacgtacacgacgagatctgatggcgatgtaccagg |
| | | ggggaggtggcggcagaaacgcccccgccgtaaacacggcgggccacgcctgtcaagccact |
| | | ccctggggccgagcgcctgaggtgatacagagagataagcacactgggcgctgacaacgcccg |
| | | ggacctcagtgagaagagcagtagggccgtgatatgggactccattggatatcccccgcagtcg |
| | | gaactcacggctactccgggagggaagcccgcgactggtactgtactgggtgatagcctggtgc |
| | | cttccctctcactgagtatgaaggctgaaaaccccct |
| 646 | Kagoshima- | tatagtagcctgatctcgcaccgttaccgctcgacgggaatgtgaaactggcacccctcctctccc |
| | 2-24-KoV | ctaccaccctactccacgcccccattcataatttacaacgccgcacacagcggcggccgccaag |
| | | ggctagcctggcggaataaaaggaacctgggtctaccctcacaagccaaaaggtaggaccctg |
| | | tgtccctgaatgctcggtgaggaatgctgcaccgtaacgctagtgaagtgtttgcaagttctggccc |
| | | ggcaagcctacagagtgctgtgatccgctgcggacgccatcctggtaacaggacccccagtgtg |
| | | cgcaacagtatgacagacacggatgacacagcatcatggaccattgcgcgaaagtgcgtgcg |
| | | ccatatccctgtacacaggtgtgcactctggaccctaggaatgctgcgaaggtaccccgatcggc |
| | | gggatctgatcgcaggctaattgtctatgggacagtaccatacatactccacaattgactgcttaa |
| | | ctgactctggatcagtgcaccactgctctactgctctcaaaacggcacacttaccaactctcacca |
| | | tcgaccaacaccatttacacactaactatacgactcactgactcctggcaggtgaagac |
| 647 | Kashmirbee | tacgtacaattagacgcacgacatgcaacaatgaactcacatgtggcgctcggtagtaaccagag |
| | virus | gggcgtcattcccccgtatggagtggagaatataagctaccgactcgagctgtagaataattcagc |
| | | aacttataacgaacacgaatatagtcgacgaaaccatatagccataaactatgatagattataatg |
| | | ataaacagctcatgtaactgtctaaactacataaatacaactggattacgaaccataagtaactatca |
| | | agatgaagtctagtagtctcccaatataccgtgaaaagaatgagggacgagatagctctatttaaa |
| | | gacgtgaggcataaaactgataaatacattacctgagaaacctccataggagaagaatagaaaa |
| | | gattagtacctatacttaatagaaataaatatgaaataatgctgaagacaagtatacgattattaacct |
| | | ctatatactatataaagtatctgtgagtctcagtggacatcacagtaaggtcgcagaaacagtaatc |
| | | ttttcattcctgtgtcggagcagtggtaatggagccggacgatacgccaaaac |
| 648 | Jingmen | tgtgtttttgtcaagataattgttctgtgattaacagtgattgtggttcgtgtaatgcgacgcagtcaaat |
| | picorna- | gctagttttgatgaagtgtatgagagagtggaaaacttatctcataagaagattgaagagtgtgtaga |
| | like virus | tcaggctattgatcgagcttctaagcttcgtgattacaagcttaatgttcacaatggctcccgacggg |
| | | aatcatctgatcctctctttatttcgccccattcgttgttatcgcttggggtatctaagtttgttgcgtttga |
| | | gcagcatcacagtttcgcttcagttgagtctctgaagttgcttgctctgtct |
| 649 | Mumps | accaaggggaaaatgaagatgggatgaggtagaacaaatagtgtaagaaacagtaagcccgga |
| | virus | agtggtgttttgcgatacgaggccgggctcgatcctcaccatcattgtcgataggggacattttgac |
| | | actacctggaaa |
| 650 | Mouse | gaagttgatcatgaacttggttattggtggaacgcacatgaactcccaacaatgatcttgaagacac |
| | Mosavirus | agcgtggtaacaattaccatgcccagtggctgcccaagacattgatggctattgggtgatttatgat |
| | | gac |
| 651 | Miniopterus | gttgtcgacccgttgatggataagcatgaggtggattcccccgattatgtctacccgttactatggc |
| | schreibersii | gggcggtcgatcagggtgatctactgaggactgcaccaagtattatcattattctcagatctccgg |
| | picornavirus | ctgtttgacgcagtaggacagcaggactattactcttaatctattctacccactagggtcctatccta |
| | 1 | gtggagggagggtgccacccatctctattagagagtgcgcctggcggtctaccgtctctggaaa |
| | | aaggagcacatggcatgctacaattggcacaagaaaacaagctagcggattattctagtactaga |
| | | ggaagctgtagcgaccctgtatggcgagcggactcccctctcggcgacgagagcctctcgggcc |
| | | aaaagccaagtgttaatagcacccatacaggcggcagtaccccactgccctactcaacatacaat |
| | | gactgatgaaccactgaggatactgacacctagtagtaggattccaaggaatgtcctgaaggtac |
| | | cctgttagcttacgcgcaggatctgatcaggagtctattacagtgctgtacactgtgcaagggatta |
| | | aaaattgtttgaggaatccccgagatagtggtctatctatcctattagattacagacacg |
| 652 | Linda | gtatagcagcagtagctcaaggctgctatacgattggacataccaaattccaattggtgttagggac |
| | virus | cacctaggtgaaggccgacgacaggtagccattcctgttagtaggacgaaccgttatggtggact |
| | | ggttgctcaggtgagcaggctgcaatgcgtaagtggtgagtacaccacagccgtcaaaggtgcc |
| | | actggtaaggatcacccactggcgatgccttgtggacgggggcgtgcccaacgcaatgttagcg |
| | | gtggcgggggctgccatcgtgaaagctaggtcttgatggaccttgttgcctgtacagtctgatagg |
| | | atgccggcggatgccctgtgacagccagtataaagaatatccgagtgattgcac |
| 653 | Lesavirus | tctttctttattttcttatgtaactcactattaagattattagcctacttgtgagcttatgcgggaccactg |
| | 2 | tcttagacaaccccacatagtcatgagtaagtacacgcaaccattacgattactattaaccgtctga |
| | | ccttttgataacaactgaagttaggcgtgaaacatgcatttataccaaagtagccccgcatttcccca |
| | | ctacggtgggggggctaccctactggctaggaactgtagccattatgtgagcctggctttcaggat |
| | | ctcacaacacaacagactctcacaatggaatatgggtgagattgcagtgacatgaacaagtatcta |
| | | gtagtacatagactcaagcctagttgcctgcggaacaacatgtggtaacacatgccccagggtcca |
| | | aaagacaagggttaacagcccatctaggtgtctgtgtgtgaagaatactttagtagtgttgttatgat |
| | | ctcacctgttagtacagaatgagtatggcaggtgaaggatgtcctacaggtacccattatatggatc |
| | | tgagtaggagaccactagtggtggctttaccgccaggtgagtggtttaaaaagcgtctagccaagc |
| | | caacagcactagggatagtgctactatatatatattacagtgtatatggtgacaa |
| 654 | Lesavirus | gtaactaataagcaagattactgcctgcaaactgcttcaatgggaccaccgcttcggcgacccatt |
| | 1 | gttgagtttgtatgtttttaagtaatattgcaaccatacgattatatagccgcctctctataatgatcagt |
| | | tatagtgggacgtgaaacattggatactcacacacgtccggtcacccgggcgtgtgacttccgta |
| | | agtcctatccacataccatcgtgggtaggccagcatgatgcacaggctgtgacagtgtgggtggg |
| | | ctttccacctctcaacaacacactgaattgcaatgcactcacggaggaaatgacaataggttatagt |
| | | tttgaactgtgctagtaatttattcacattaagccatgagcctgcggaatcacatgtggtaacacatg |
| | | cctcagggcccaaaaggcacgggttagcagccccttcatggtgtgttagaagtgaaaacacatag |
| | | tatgagctataatatattgagtatctctgtagtgtaccccgccaaatgtaaggatgcccagcaggt |
| | | acccatatatggatctgagctggggattgatagtgtatctataaatgcactgatcaatttaaaaagcg |
| | | tctaagtaggcacaaacactggggacagtgatttcattattatttatttgatta |
| 655 | Phopivirus | gggagtaaacctcaccaccgtagccgtggatacggctacctatattggatgtaaatattaattcctg |
| | strain | caggttcaggtctcttgaattatgtccacgctagtggcactctcttacccataagtgacgccttagcg |
| | NewEngland | gaacctactacacttgatgtggttaggggttacattataccctgggccactaggccattacccctg |
| | | cactatcattattcaccgggctctcagcatgccaatgaccgaccggtgcgcccgccggggttaa |
| | | ctccatggttagcatggagctgtaggccctaaaagtgctgacactggaactggactattgaagcat |
| | | acactgttaactgaaacatgtaactccaatcgatcactacaaggggtaggctacgggtgaaacccc |
| | | ttaggttaatactcatattgagagatacactgataggttaaggagctggataatggtgagtttaacga |
| | | caaaaaccattcaacagctgtgggccaacctcatcaggtagatgcttaggagccaagtgcgtagg |
| | | ggtgtgtgtggaaatgcttcagtggaaggtgccctcccgaaaggtcgtaggggtaatcaggggca |
| | | gttaggtttccacaattacaatttgaa |
| 656 | Pestivirus | gtatacgagattagctcatactcgtgtacaaattggacgtagcaaatttaaaaattcggatagggtcc |
| | strain | ccatccagcgacggccgaacggggttaaccatacctctagtaggactagcagacggatggacta |
| | Aydin | gccacagtggtgagctccctgggaggtctaagttctgagtacagaacagtcgtcagtagttcaacg |
| | | ctggtaaaccccagccttgagatgctacgtggacgagggcatgcccaagacacaccttaacctgg |
| | | acgggggtcgtccaggtgaaagtacccatctagggtgctgggagtacagcctgatagggcgctg |
| | | cagaggcccactgacaggctagtataaaaatctctgctgtacatggaac |
| 657 | Quail | tttgcatcagttcgcccctcccctcaccataccatttcccctattaggactgatacttggttatgatga |
| | picornavirus | gcagaggatttcgcaagttatgatcttgataaaaagtaattcacgaatcatgggattatagcctgga |
| | QPV1 | agtgaacactcatgtggcaagtgggttagtagctctccatgacccatgtgcagtggactgacaaca |
| | | gtgagttcggggagtgtagtaaagggaaagtattacttacccgcacctgctatacgtggtgtacgta |
| | | ggatacgagttagtagtgcttagcaactttaaactggtgctgaaatattgcaaggtcactgaagttgt |
| | | gaacgcgaacgctccgccactgccatgtatagcgtgcaatgcataaatggtgcactacatgatacg |
| | | agggaatgggaaaccctccatggccgaatgcagggtgacagcctgccggcggatgcctgttgtt |
| | | agtataatccgttgatgccac |
| 658 | Porcine | acactcatttcccccctccacccttaaggtggttgtatcccctacaccctaccctcccttccacatagg |
| | sapelovirus | acgaataaacggacttgagattaaggcaagtacataaggtatggataggatacacttaaatggca |
| | 1 | gtagcgtggcgagctatggaaaaatcgcaattgtcgatagccatgttagcgacgcgcttcggcgtg |
| | | ctcctaggtgattcggcgactggttacaggagagtagacagtgagctatgggcaaacccctacag |
| | | tattacttaggggaatgtgcaattgagacttgacgagcgtctctttgagatgtggcgcatgctcttgg |
| | | cattaccatagtgagatccaggagggaaacctggactgggtctatactgcctgatagggtcgcg |
| | | gctggccgcctgtaactagtatagtcagttgaaaacccccc |
| 659 | Porcine | atgacgtataggtgaggctctatgccaggcatagtattgtcaggagctgtgaccattggcacagc |
| | reproductive | ccaaaacttgctgcacagaaacaccatctgtgatagcctccttcaggggagcttagggatgtccct |
| | and | agcaccttgcaccggagttgcactgattacggtctctccacccattaacc |
| | respiratory | |
| | syndrome | |
| | virus 2 | |
| 660 | Porcine | Gaaccttagaagatacacaaacaaagaccaataggagtccaacacccagaggattgcggtcaa |
| | enterovirus | gcacttctgatccccggacctagtagtgataggctgtacccacggccgaagatgaacccgtccgtt |
| | 9 | atccggctacctacttcgggaagcctagtaacattctgaagtctctgaggcgatcgctcagcacga |
| | | ccccggtgtagatcgggctgatgggtctccgcataccccacgggcgaccgtggcggaggccgc |
| | | gttggcggcccgcctatggcgaaagccataggacgcctcttagatgacagggtgtgaagagcct |
| | | actgagctgggtagtagtcctccggcccctgaatgcggctaatcctaaccacggagcgtccacca |
| | | gcaatccagctggcagggcgtcgtaacgggcaactctgtggcggaaccgactactagggtgtcc |
| | | gtgtttccattgatcctattaggctgcttatggtgacaacgataagagttatcataaagctcttgggtt |
| | | ggccacctggaaaaagttatcagtgatgatattgacggctctcacgcctaccaataagacaagcc |
| | | ctatatttacttgagcatatactcgtcagaagaaatcacagagtatcataggatagttactcacatta |
| | | aggacaag |
| 661 | Pigeon | tttatttagctgttaagattatttgtgccgagAccccatagtaggatcaggtgaccacattaagctct |
| | picornavirus | Cccgaccacacatccaaacgataggcggtgtaagggctccctggctaagtgatactcattgctag |
| | B | ggaagtgagcgacccgttaccagtaggaatacaggaggtcttagttgcctaaccagataaagtgg |
| | | tgctgaaatattgcaagctcaatgtctggcgaacgacggactaccgttgaactattgttaacgcccg |
| | | cgtgtgtaggcaacacacgggttagtaggtcacttacattgacatccgtgccgggaaagcggatct |
| | | gagctatcgattgcctgatagggtgccggcgggcgcggtacgtgtggtatagtccgctgtcttggg |
| | | gtatggcgtctactcggattgagtcgattggaatgtcccatgtcggagatgtcgttaccggtgtttg |
| | | ctttacttgtgcacgaataagaaaacagagtaggagattggaagttaatggataacatcaagtacc |
| | | attgcgacctcgtgcatataggccagaaaatcgaccacaaaatcgaga |
| 662 | Picornavirus | aaacgggaggatcggctaggcttatcctcttaatagtctacaaaactgggctgactggtggggga |
| | HK21 | gctactagatccgggagaggactagttaccccgcgtaacttccattagtcactccctccacctacc |
| | | catccctgtcccttagactcttaagtaggtgtgcaggcctggccccccggaaatgggcaaatcgg |
| | | acgtttgcgtgtagggtcgactgaaaggtggggcccactccaccgtagtaggatcacctgatcac |
| | | gtttaaacctctccgggcaggtatcgctagacactaggctgtataggatggcacgcacttaggatc |
| | | gcaccacctagtgcgccaagatcccgcattgagctcaagtacatggactagtaagatgtctaacc |
| | | agaggaggtggtgctgaaatattgcaagccactctggcgaacgtccactgcattgcctggaacag |
| | | gctctctagcgccctccactggtagcgcggtggtgggttagtaggatacctatatggacaggggat |
| | | gcgggaatacccctcactagctagtgactggttgatcgactggcggcggatccagtgatacttgca |
| | | taatccgcagacttgggag |
| 663 | Picorna- | agccatgaactagtgtgcgattcccacagtgaggtcgaaagccccgcactgtctactcgcatattt |
| | virales | gactccagtccaccgcagccagcggttaggactggttaaagtgcattatgtgcacggcgccacg |
| | Tottori-HG1 | cagaactgccagaaatggtaagctgcgcccaacgccaacggtagtgtatcccgttagtcacacgt |
| | | ttacagctgttcgttaacagtagggttttgtcgacccggaccccttaatgcgcgcgaattcaaccgc |
| | | gcctagtcggcaatggtatcatttaatcccatgcactacgggagaaatttgagaccaaagaattcct |
| | | gagggccactgcttgctctaagtgcaatgcctcgggagacttctgtcaggagcctagcggctttca |
| | | accgcgacagctaactcctgcgggatgtttggtgtccatacttactggcgtcctcacaacgctaagt |
| | | ggatgttgtccacaggtaggcaaacaccgagccccacattcaggagacctgtatgaacgatcctat |
| | | cagcattagagttggaattgggtgtgctaacgtccgcataagtgcaccccgtggtaacgctgggaa |
| | | actatccagcgcaacgtactgtcctcaatgtctagggaaggaccgccctaagcgtacaaccgggc |
| | | catgtgtcgagc |
| 664 | Rodent | ttcaaagaggggtccgggattttcctggtccccctctttgggcacccttggctcgggggtgtgaata |
| | hepatovirus | ccgtgctcgcgtttgccgtgcgttaacggcttcatttatgtttgtttgtctgttttattatgttGgtttgtct |
| | | gtttgttatgttggtattgttcgtgtttaatgttatgaccacattacactccagccaatgaagaacagatg |
| | | gtgcggttattgctggcggaattcctaacgtcctggatccgttggtacgcatcacaaaacaatttgca |
| | | gagagagtggtgaaacggcttgggaatccctgagtacagggaaatcacactgatagctcatcttg |
| | | gctgttttcagtcatggaccttatgcagtgtaatttgggtgtaccccccatagcttaggaggaatgttc |
| | | tgtcttggcactagagtgggacgctgatgcctccgtgtctaggatggtctaagggacagaatgggg |
| | | tgcctctgatgccatactacctgatagggtgctctcacggcctctgcatcttagtgagaagttcaattt |
| | | t |
| 665 | Rinderpest | accaaacaaagttgggtaaggatcggtctatcaatgattatgatttagcacacttaggattcaagatc |
| | virus | ctatcgactggagcaggcttaaggtaaaggttctttaaa |
| 666 | Rabovirus | ctacggatatttgcatgacccgctttctatcgccccaacaatcccctttgtaaccacaagctttactca |
| | A | ggctagcagcccgactagctgtttggaagaaaaggctagggcacacaccaacaacaccgaccc |
| | | cactggtcgaaggccgcttggcaataagactggtggaacagggtcgcctgtagttgtttggaacat |
| | | tctttctaatgactttgtcagcggtgctactcacaccgtaactcttctaccctatccccacgcttgtgga |
| | | actaggaggggatgagtgattcaagtaagtactgtcagaatggtgaaaatgatctgattctgaaacg |
| | | ctatggatccatcgaaagatggggctacacgcctgcggaacaacacatggtaacatgtgccccag |
| | | gggccgaaagccacggtgataggatcacccgtgtagtttgagatcatatcaatgttcatagtctagt |
| | | aagatgatttgaaatctaactgagctgatggctaactgcttgtcttattgcggcctaaggatgtcctgc |
| | | aggtaccttagataaccttaagagactattgatctgagcaggagccaaagtggtctttcccagcttt |
| | | ggttaaaaaacgtctaagccgcggcagggggcgggaggccccctttcctcccaaaacttaatatt |
| | | gattgt |
| 667 | Shingleback | ctgtgagtaccgacaggctcgaagtctattatgaggcgtcgaaacagaaaacctgtaacaactccg |
| | nidovirus 1 | gtttcatctatcactgccgtcaagaggcagaagaggacgaccacgtgtcaccagatcacttgtatct |
| | | gtttcagtcaggaagtcaacttttcgacgaagttcgaccattcatcgacccgctgaaaagcgtagaa |
| | | tcgagctcgtgaatttcgagctgaaacaacaaatcaacgagaacgagtggtacggttattataatta |
| | | cgacaaccaaaactgcaaagttcagttgccagtcacatgtcgaatcgaggacgtaacctgggatc |
| | | aggtttacgtg |
| 668 | Seneca | tttgaaatggggggctdgggccctgatgcccagtccttcctttccccttccggggggttaaccggctg |
| | valley | tgtttgctagaggcacagaggggcaacatccaacctgcttttgcggggaacggtgcggctccgatt |
| | virus | cctgcgtcgccaaaggtgttagcgcacccaaacggcgcacctaccaatgttattggtgtggtctgc |
| | | gagttctagcctactcgtttctcccccgaccattcactcacccacgaaaagtgtgttgtaaccataag |
| | | atttaacccccgcacgggatgtgcgataaccgtaagactggctcaagcgcggaaagcgctgtaac |
| | | cacatgctgttagtccctttatggctgcaagatggctacccacctcggatcactgaactggagctcg |
| | | accctccttagtaagggaaccgagaggccttcgtgcaacaagctccgacacagagtccacgtga |
| | | ctgctaccaccatgagtacatggttctcccctctcgacccaggacttctttttgaatatccacggctcg |
| | | atccagagggtggggcatgacccctagcatagcgagctacagcgggaactgtagctaggcctta |
| | | gcgtgccttggatactgcctgatagggcgacggcctagtcgtgtcggttctataggtagcacatac |
| | | aaat |
| 669 | Sclerotinia | ttgaattaatcttttacgtttacgcgcataaaatcaggacacatctcttgtatactttagtatatcaatgat |
| | sclerotiorum | gtttttgttttatgcgattaatcgtaagagaacttctttccatccgcctgtatgggcgggataataagttc |
| | dsRNA | accgccttggtcgaggcgcaaacttgtatgtgcaaaggtgagctatatgctcgaaatagtcgtaact |
| | mycovirus-L | aacacacagccactacctgtagagctctattgatccggaatcctttagtgggaatgcagagctca |
| | | ccggacctgcgggttcttcggcgttagggacttctgtttcagccttgaatcatttacctttataccttct |
| | | ctgaggcgcctgggccgggcgcgatattaagtacaagtcaaggacatcgcgggtagtggtctaat |
| | | cagccgctagtcctgctggagagttccaacttagttgggtgtggtgcatactagctggatagagtag |
| | | gtatgtattgctaacgtatgccggaggctatccgtcctcggtagaacgtgccgaggagtagtctctg |
| | | cagacccccgaacgcgtggggtctttacttaaatgtaggcggagggagcgctcgtaggtggaac |
| | | gactgcctcccagtcgaatgcaagattttgcacgcggaccagtctgcccggcaattcccgggtg |
| 670 | Yak | ctccggcacagccgcaccagtgcactggtacgctagtaccttttcacggggtagtcggtatccccc |
| | enterovirus | cccgtaacttagaagcatgtaacaaaccgaccaataggtgcgcggcagccagctgcgttgcggtc |
| | | aagcacttctgtctccccggtccgcaaggatcgttacccgcccactccactacgaggagcctagta |
| | | actggccaagtgattgcggagttgcgttcagccacaaccccagtggtagctctggaagatggggc |
| | | tcgcacatcccccgtggtaacacggttgcttgcccgcgtgtgcttccgggttcagtctccgactgttc |
| | | acttcaacatcacgcaaccagccaagagccgattgtgctggagtggtcttcctccggggccgtga |
| | | atgctgctaatcctaacctccgagcgtgtgcgcacaatccagtgttgctacgtcgtaacgcgtaagt |
| | | tggaggcggaacagactactttcggcaccccgtgtttcctttattttattcttattttatggtgacaattg |
| | | cagagatttgtgatattgcgactttaccgttaaacatagcactgcattacctggttgcattccacaaaa |
| | | cttcagagattcctagttcctacattgacctacttgtttatttgaatcttaaatacaaacttgagcaagtg |
| | | aa |
| 671 | Wobbly | cggctgtgagtgcttagcatatgctagagtactacagccgggtgttggagtcatatgcactggttgc |
| | possum | ctgtataatagtcgggatctgtctgacctacattatctttgggagttgcttatcacgacaattctcgaag |
| | disease | tgtctgtcgacagcttacccccgattcgacaaggccccttgtccaccgcagacctatcgattttcaac |
| | virus | gagaacactatcagaggtttaaatttaaaactcaccaaca |
| 672 | Avian | gctttttcaatcccttgtgtcgatgttcccgtatgtcatctggttcatgtaacggtgcaacttctattttg |
| | orthoreovirus | gtaacgttcactgtcaggcagcgcaaaactcggcgggtggtgatcttcaagcgacttcctctcttgtt |
| | segment | gcttattggccctacttggctgcgggcggtggtctgctcgttgttattattataattgttggcgctgtttg |
| | S1 | ttgttgcaaggctaaggttaaagcggacgcagcccgaaacgttttctaccgagagctgttcgcactt |
| | | aattcgggtaaaagtgatgcaggacctccgatttaccaggtttagtgtacgacgatttgagttttcac |
| | | ctttcgtcttagaggagtgcactactccatctttcacgactataactaataccgatccggctctctactt |
| | | taacattgagtttccgtcaagtcatcgtctctcccccttcattccagaactgttgtctcagccttgtacc |
| | | gttcacgtttcattgattcggagattcgctctctgtgcaaccttatctagtatttgtgaatacgactgtgc |
| | | gctactgccatccatcaacgctattacgacgatccctacaccaggtgcgtcatcatctctgattgttc |
| | | attggg |
| 673 | Caprine | ggggcctcggccccctcaccctcttttccggtggccacgcccgggccaccgatacttcccttcact |
| | Kobuvirus | ccttcgggactgttggggaggaacacaacagggctcccctgttttcccattccttcccccttttccca |
| | d10 | accccaaccgccgtatctggtggcggcaagacacacgggtctttccctctaaagcacaattgtgtg |
| | | tgtgtcccaggtcctcctgcgtacggtgcgggagtgctcccacccaactgttgtaagcctgtccaa |
| | | cgcgtcgtcctggcaagactatgacgtcgcatgttccgctgcggatgccgaccgggtaaccggtt |
| | | ccccagtgtgtgtagtgcgatcttccaggtcctcctggttggcgttgtccagaaactgcttcaggtaa |
| | | gtggggtgtgcccaatccctacaaaggttgattctttcaccaccttaggaatgctccggaggtaccc |
| | | cagcaacagctgggatctgaccggaggctaattgtctacgggtggtgtttcctttttcttttcacacaa |
| | | ctctactgctgacaactcactgactatccacttgctctcttgtgcctttctgctctggttcaagttccttg |
| | | attgtttttgactgcttttcactgcttttcttctcacaatccttgctcagttcaaagtc |
| 674 | Caprine | ccccctcaccctcttttccggtggccacgcccgggccaccgatacttcccttcctccttcgggact |
| | Kobuvirus | gttggggaggaacacaacagggctcccctgttttcccattccttcccccttttcccaaccccaaccg |
| | d20 | ccgtatctggtggcggcaagacacacgggtctttccctctaaagcacaattgtgtgtgtgtcccagg |
| | | tcctcctgcgtacggtgcgggagtgctcccacccaactgttgtaagcctgtccaacgcgtcgtcct |
| | | ggcaagactatgacgtcgcatgttccgctgcggatgccgaccgggtaaccggttccccagtgtgt |
| | | gtagtgcgatcttccaggtcctcctggttggcgttgtccagaaactgcttcaggtaagtggggtgtg |
| | | cccaatccctacaaaggttgattctttcaccaccttaggaatgctccggaggtaccccagcaacag |
| | | ctgggatctgaccggaggctaattgtctacgggtggtgtttcctttttcttttcacacaactctactgct |
| | | gacaactcactgactatccacttgctctcttgtgcctttctgctctggttcaagttccttgattgtttttga |
| | | ctgcttttcactgcttttcttctcacaatccttgctcagttcaaagtc |
| 675 | Caprine | ctcttttccggtggccacgcccgggccaccgatacttcccttcactccttcgggactgttggggagg |
| | Kobuvirus | aacacaacagggctcccctgttttcccattccttcccccttttcccaaccccaaccgccgtatctggt |
| | d30 | ggcggcaagacacacgggtctttccctctaaagcacaattgtgtgtgtgtcccaggtcctcctgcgt |
| | | acggtgcgggagtgctcccacccaactgttgtaagcctgtccaacgcgtcgtcctggcaagactat |
| | | gacgtcgcatgttccgctgcggatgccgaccgggtaaccggttccccagtgtgtgtagtgcgatct |
| | | tccaggtcctcctggttggcgttgtccagaaactgcttcaggtaagtggggtgtgcccaatccctac |
| | | aaaggttgattctttcaccaccttaggaatgctccggaggtaccccagcaacagctgggatctgac |
| | | cggaggctaattgtctacgggtggtgtttcctttttcttttcacacaactctactgctgacaactcactg |
| | | actatccacttgctctcttgtgcctttctgctctggttcaagttccttgattgtttttgactgcttttcact |
| | | gcttttcttctcacaatccttgctcagttcaaagtc |
| 676 | Caprine | gtggccacgcccgggccaccgatacttcccttcactccttcgggactgttggggaggaacacaac |
| | Kobuvirus | agggctcccctgttttcccattccttcccccttttcccaaccccaaccgccgtatctggtggcggcaa |
| | d40 | gacacacgggtctttccctctaaagcacaattgtgtgtgtgtcccaggtcctcctgcgtacggtgcg |
| | | ggagtgctcccacccaactgttgtaagcctgtccaacgcgtcgtcctggcaagactatgacgtcgc |
| | | atgttccgctgcggatgccgaccgggtaaccggttccccagtgtgtgtagtgcgatcttccaggtc |
| | | ctcctggttggcgttgtccagaaactgcttcaggtaagtggggtgtgcccaatccctacaaaggttg |
| | | attctttcaccaccttaggaatgctccggaggtaccccagcaacagctgggatctgaccggaggct |
| | | aattgtctacgggtggtgtttcctttttcttttcacacaactctactgctgacaactcactgactatccact |
| | | tgctctcttgtgcctttctgctctggttcaagttccttgattgtttttgactgcttttcactgcttttcttc |
| | | tcacaatccttgctcagttcaaagtc |
| 677 | Caprine | ccgggccaccgatacttcccttcactccttcgggactgttggggaggaacacaacagggctcccc |
| | Kobuvirus | tgttttcccattccttcccccttttcccaaccccaaccgccgtatctggtggcggcaagacacacgg |
| | d50 | gtctttccctctaaagcacaattgtgtgtgtgtcccaggtcctcctgcgtacggtgcgggagtgctcc |
| | | cacccaactgttgtaagcctgtccaacgcgtcgtcctggcaagactatgacgtcgcatgttccgctg |
| | | cggatgccgaccgggtaaccggttccccagtgtgtgtagtgcgatcttccaggtcctcctggttgg |
| | | cgttgtccagaaactgcttcaggtaagtggggtgtgcccaatccctacaaaggttgattctttcacca |
| | | ccttaggaatgctccggaggtaccccagcaacagctgggatctgaccggaggctaattgtctacg |
| | | ggtggtgtttcctttttcttttcacacaactctactgctgacaactcactgactatccacttgctctcttgt |
| | | gcctttctgctctggttcaagttccttgattgtttttgactgcttttcactgcttttcttctcacaatcctt |
| | | gctcagttcaaagtc |
| 678 | Picorna- | tttgctcagcgtaacttctccgggttacgtggagaccaaaaggctacggagactcgggctacggc |
| | virales | cctggagcacctaggtgctcctaaagacgttagaagttgtacaaactcgcccaatagggcccccc |
| | sp. | aaccaggggggtagcgggcaagcacttctgtttccccggtatgatctcataggctgtacccacgg |
| | isolate | ctgaaagagagattatcgttacccgcctcactacttcgagaagcccagtaatggttcatgaagttgat |
| | RtMruf- | ctcgttgacccggtgtttcccccacaccagaaacctgtgatgggggtggtcatcccggtcatggcg |
| | PicoV | acatgacggacctccccgcgccggcacagggcctcttcggaggacgagtgacatggattcaacc |
| | | gtgaagagcctattgagctagtgttgattcctccgcccccgtgaatgcggctaatcccaactccgga |
| | | gcaggcgggcccaaaccagggtctggcctgtcgtaacgcgaaagtctggagcggaaccgacta |
| | | ctttcgggaaggcgtgtttccttttgttccttttatcaagttttatggtgacaactcctggtagacgtttt |
| | | attgcgtttattgagagatttccaacaattgaacagactagaaccacttgttttatcaaaccctcacagaa |
| | | taagataaca |
| 679 | Apodemus | ttactcagcgtaactactccgggttacgtgatgaagaagaggctacggagattctcgggctacggc |
| | agrarius | cctggagccactccggctcctaaagatttagaagtttgagcacacccgcccactagggcccccca |
| | picornavirus | tccaggggggcaacgggcaagcacttctgtttccccggtatgatctgataggctgtaaccacggct |
| | strain | gaaacagagattatcgttatccgcttcactacttcgagaagcctagtaatgatgggtgaaattgaatc |
| | Longquan- | cgttgatccggtgtctcccccacaccagaaactcatgatgagggttgccatcccggctacggcga |
| | Aa118 | cgtagcgggcatccctgcgctggcatgaggcctcttaggaggacggatgatatggatcttgtcgtg |
| | | aagagcctattgagctagtgtcgactcctccgcccccgtgaatgcggctaatcctaaccccggagc |
| | | aggtgggtccaatccagggcctggcctgtcgtaatgcgtaagtctgggacggaaccgactactttc |
| | | gggaaggcgtgtttccatttgttcattatttgtgtgtttatggtgacaactctgggtaaacgttctattgc |
| | | gtttattgagagattcccaacaattgaacaaacgagaactacctgttttattaaatttacacagagaag |
| | | aattaca |
| 680 | Niviventer | ccctttcataaccccccccttttaacccaacccttcgtaaccgtacgcttcactcgcctttgggtatag |
| | confucianus | cggcccaatgtgctgaagaaaaggatacgctataaggggccaacgggtggtggcccttaagacc |
| | picornavirus | acccaacctagaagcttgtacactcgggcaatagtgaggcccacatccagtgggtcaagcccaaa |
| | | gcattcttgaccccggtatgatctcataagctgtacccacggctgaaagagtgattatcgttatccca |
| | | ctcagtacttcggagagcctagtacaccacttggaaatggaagtctgtgatccggggttgaccctg |
| | | aaccccagaaactcatgatgaggctaaccttcccgaacacggcgacgtgtggttagcctgcgctg |
| | | gcatgaggcctctttgtaggcagactgaaatggaagggtgacgaagagccgactgagctactgttt |
| | | tattcctccggccccctgaatgcggctaatcctaactcctggtccagtacttgtaacccaacaggtg |
| | | gctggtcgtaatgcgtaagccgggagcggaaccgactactttggggcgtccgtgtttctcaatatta |
| | | ttcatttctagcttatggtgacaatttatgattgcagagattgtgctgtatttgtgtctgagagaagaagt |
| | | aacaat |
| 681 | Bat | tttcaaaaggccctgggcatacggcgttattcgtaacgtcgtatgtccagggcggtagcatcaggc |
| | picornavirus | caaggcctgatgctaccacgtgtggactaaaccacacactcttcttgtgacacgttgtgtcacctatc |
| | isolate | cctttcttggtaacttagaagcttgtacacttacgcacgtaggtgccccacatccagtggggtttgtg |
| | BtRs- | caaagcaatcttgttccccggtaaaccctgataggctgtaaccacggccgaaacaaggtttgtcgtt |
| | PicoV | acccgactcactactacacaaagcctagtaaagacaatgaaagtgcgcagcgtgatccggtcaaa |
| | | acccccttgaccagaaacacatgatgagggtcaccaacccccactggcgacagtgtggtgtccct |
| | | gcgttggcatgtggcctcgtagaggcgagcaatctggatttgctccgaagagccccgtgtgctagt |
| | | gtttatacctccggccccttgaatgcggctaatcctaacccccgagcatgtacacacaagccagtgt |
| | | gtagcatgtcgtaatgagcaatttggggatggaaccgactactttagggtgtccgtgtttctcattatt |
| | | ctttgtttgatgtttt |
| 682 | Rhinolophus | ttttttttctcaggcggtagcatccagccaaggcctgatgctaccaacgtgtgactaaaccacactct |
| | picornavirus | ctttttgtgatacattgtgtcacctatccctttcttggtaacttagaagcttgtacacccacgcacgtag |
| | strain | gtaccccacatccagtggggttgtgcaaagcattcttgttccccggtaaaccctgataggctgtaa |
| | Guizhou- | ccacggctgaaacaaggtttgtcgttacccgactcactactacgcaaagcctagtaaagttcaatga |
| | Rr100 | aagtgcgcagcgtgatccggtcaaaacccccttgaccagaaacacatgatgagggtcaccaacc |
| | | cccactggcgacagtgtggtgtccctgcgttggcatgtggcctcatagaggcgttgcaatctggatt |
| | | tgctccgaagagccccgtgtgctagtgtttatacctccggccccttgaatgcggctaatcctaaccc |
| | | ccgagcatgtacacacacgccagtgtgcagcatgtcgtaatgagcaatttggggatggaaccgac |
| | | tacatttgggtgtccgtgtttctcattattctttgtttgatgttttatggtgacaaca |
| 683 | Rhinolophus | cggaacgttgtatgctcagggcgtaggcaccacccacgggtggtgcctacacgtgtggactaaac |
| | picornavirus | cacacactcttttcagcacttagtgctgctatctctttttgtaacttagaagtttgtacacaatgcgttag |
| | strain | ggccacacatccagtgtggtatcgcaaagcacttctgtttccccggtgctagtaggagggtggctg |
| | Henan- | ctccacggccacttgccgaacccatcgttacccgactcattacttcgcaaagcctagtaacccagtt |
| | Rf265 | gaagcaagcccggcgtgttccggtcaggaaaaaccccccctggccagaaacatgtgatgagggt |
| | | gggctatccccactggtgacagtgagccctccctgcgttggcacatggcccgatctgggcgtggtt |
| | | cttgtggatgctgccgaagagccccgtgagctagtgtttataccgccggcctcgtgaatgcggcta |
| | | accctaaccccggagcagaggctactgaagccacagtagtcgctgtcgtaacgagtaattctggg |
| | | atgggaccgactactttcgagtgtccgtgtttcctttattcttttattgttgtttatggtgacaaac |
| 684 | Human | cccctaggatccactggatgtcagtacactggtatcgtggtacctttgtacgcctgttttataccccctt |
| | enterovirus | ccccgcaactttagaagcatcaaaagcaccgctcaatagtcaccacacccccagtgtggtttcgag |
| | C105 | caagcacttctgttttcccggttgcgtcccatatgctgtgcaaacggcaaaaagggacaatatcgtta |
| | | cccgcttgtatactacgggaaacctagtaccaccattgattgtgttgagagttgcgctcatcacctttc |
| | | cccggtgtagctcaggccgatgaggctcagaatcccccacaggtgactgtgtctgagcctgcgtt |
| | | ggcggcctgccctcgccttatggcgtgggacgcttgatacatgacatggtgcgaagagtctactgt |
| | | gctatgcaagagtcctccggcccctgaatgtggctaatcctaaccactgatcccacgcacgcaaac |
| | | cagtgtgtagtgggtcgtaacgcgcaagtcggtggcggaaccaactactttgggtgaccgtgtttc |
| | | ctttattacttattgaatgtttatggtgacaattgtttgattcagttgttgccattctctacattcattt |
| | | acccagcatcaaaccaattgaactgttaca |
| 685 | Human | agtctggacatccctcaccggcgacggtggtccaggctgcgctggcggcctacctgtggtccaaa |
| | poliovirus 1 | gccacgggacgctacatgtgaacaaggtgtgaagagcctattgagctacaaaagagtcctccgg |
| | strain | cccctgaatgcggctaatcccaaccacggatcaagggtgcacaaaccagtgtacaccttgtcgta |
| | NIE1116623 | acgcgcaagtctgtggcggaaccgactactttgggtgtccgtgtttcctttttaattttgatggctgctt |
| | | atggtgacaatcatagattgttatcataaagctaattggattggccatccggtgagagtgaaatatatt |
| | | gtttacctccctgttgggtttactctaactaacttctccatttataaacttgtcatcacagttttaataat |
| | | tagaagtgcagtttaca |
| 686 | Human | tttaaaacagcctgggggttgttcccacccccagggcccactgggcgttagtactctggtatcgcg |
| | enterovirus | gtaccttagtatgcctgttttatgtctcctttcccccgcaactttagaagtaatcaagttatggctcaaca |
| | 109 | gtcgccacacccccagtgtggttccgagcaagcacttctgttccccggttgcgtcttatatgctgtgt |
| | | gaacggcagaaagggacaatatcgttatccgctcaactactacgggaagcctagtaccaccatgg |
| | | attgacctgaaagttgcgttcagcgcacccccagcgcagctcaggccgatgaggctccgaatacc |
| | | ccacgggcgaccgtgtcggagcctgcgttggcggcctgcccacgttgcaaaacgtgggacgctc |
| | | atttcatgacatggtgcgaagagcctactgtgctagttgagagtcctccggcccctgaatgtggata |
| | | atcctaaccactgaacctacgggcgcaaaccagcgtctggtaggccgtaacgcgcaagtcggtg |
| | | gcggaaccaactactttgggtgtccgtgtttccttttatctttttgaatgtttatggtgacaattgttgt |
| | | gtacagttgttaccatagtttgcattcagaaataaacctaacactttccaattatttgttaca |
| 687 | Human | ttgtgcgcctgttttatattccccccccgcaacttagaagcacgaaaccaagttcaatagaaggggg |
| | poliovirus 2 | tacaaaccagtaccaccacgaacaagcacttctgtttccccggtgacattgcatagactgctcacgc |
| | strain | ggttgaaagtgatcgatccgttacccgcttgtgtacttcgaaaagcctagtattgccttggaatcttcg |
| | NIE0811460 | acgcgttgcgctcagcacccgaccccggggtgtagcttaggctgatgagtctggacattcctcacc |
| | | ggtgacggtggtccaggctgcgttggcggcctacctatggctaatgccataggacgctagatgtg |
| | | aacaaggtgtgaagagcctattgagctacataagagtcctccggcccctgaatgcggctaatccta |
| | | accacggagcaggcggtcgcaaaccagtgactagcttgtcgtaacgcgcaagtctgtggcggaa |
| | | ccgactactttgggtgtccgtgtttcctgttatttttattatggctgcttatggtgacaatcagagattg |
| | | ttatcataaagcgaaaggattggccatccggtgagtgttgtgtcaggtatacaactgtttgttggaacc |
| | | actgtgttagtttaacctctctttcaaccaattagtcaaaaacaatacgaagatagaacaacaatacta |
| | | ca |
| 688 | Bovine | ttttctcccctccccctccaactaccttttccccctcttgtaacgctagaagtttgtgcaaaccgcctgt |
| | picornavirus | agggtactgcaatccagcagtgcataggctaagcttttcagaaccccaccccacattatactgagg |
| | | aggattgtgaaattgtgttagtatgggttagtagcggtgacccgggtaaccccaacccagaaactc |
| | | acggatgagatgaacaggaccccacatggtaacgtgtgtgttcgtctgccccgcaaggtgaggcc |
| | | gtgagagctttgcacgcgaaaaccttgaaaacccaaaagtaccttgagctcttcgctattttgtgtttc |
| | | ctccaggaccctgaatgcggctaaacctaacccgcgatccgcacgtagcaacccagctagagtgt |
| | | ggtcgtaatgcgcaagttgcgggcggtaccgactactttggtgttcctgtgtttcctttattttattttga |
| | | atttttatggtgacaacagctagaaaataagagtgaac |
| 689 | Human | acccttgtacgcctgttttatactcccctccccgtaacttagaagaaacaaaataagttcaataggag |
| | poliovirus 1 | ggggtacaaaccagtaccaccacgaacaagcacttctgtctccccggtgacattgcatagactgtc |
| | strain | cccacggttgaaagcaattgatccgttacccgctcttgtacttcgagaagcctagtaccatcttggaa |
| | EQG1419328 | tcatcgatgcgttgcgctccacactcagtcccagagtgtagcttaggctgatgagtctggacattcct |
| | | caccggcgacggtggtccaggctgcgttggcggcctacctgtggcccaaagccacaggacgct |
| | | agatgtgaacaaggtgtgaagagcctattgagctataagagagtcctccggcccctgaatgcggc |
| | | taatcccaaccacggatcaagggtgcacgaaccagtgtataccttgtcgtaacgcgcaagtccgtg |
| | | gcggaaccgactactttgggtgaccgtgtttccttttattatttcaatggctgcttatggtgacaatcatt |
| | | gattgttatcataaagcgaattggactggccatccggtgaaagtgaaacatattgtttgcctcctcgtt |
| | | gggtctacttcaaccaatctttacttacaatcttaccactacagttttgctggttagaagtgtgtttcacg |
| 690 | Human | ttgtgcgcctgttttatactcccctcccgcaacttagaagcacgaaaccaagttcaatagaaggggg |
| | poliovirus 2 | tacaaaccagtaccactacgaacaagcacttctgtttccccggtgacattgcatagactgctcacgc |
| | isolate | ggttgaaagtgatcgatccgttacccgcttgtgtacttcgaaaagcctagtatcgccttggaatcttc |
| | IS_061 | gacgcgttgcgctcagcacccgaccccggggtgtagcttaggccgatgagtctggacattcctca |
| | | ccggtgacggtggtccaggctgcgttggcggcctacctatggctaacgccataggacgttagatg |
| | | tgaacaaggtgtgaagagcctattgagctacataagagtcctccggcccctgaatgcggctaatcc |
| | | taaccacggagcaggcggtcgcgaaccagtgactggcttgtcgtaacgcgcaagtctgtggcgg |
| | | aaccgactactttgggtgtccgtgtttcctgttatttttatcatggctgcttatggtgacaatcagagatt |
| | | gttatcataaagcgaattggattggccatccggtgagtgttgtgtcaggtatacaactgtttgttggaa |
| | | ccactgtgttagctttgcttctcatttaaccaattaatcaaaaacaatacgaggataaaacaacaatac |
| | | taca |
| 691 | Coxsackie- | cctttgtgcgcctgttttatgcccccttcccccaattgaaacttagaagttacacacaccgatcaacag |
| | virus | cgggcgtggcataccagccgcgtcttgatcaagcactcctgtttccccggaccgagtatcaataga |
| | B5 | ctgctcacgcggttgaaggagaaaacgttcgttacccggctaactacttcgagaaacctagtagca |
| | | tcatgaaagttgcgaagcgtttcgctcagcacatccccagtgtagatcaggtcgatgagtcaccgc |
| | | attccccacgggcgaccgtggcggtggctgcgttggcggcctgcctacggggcaacccgtagg |
| | | acgcttcaatacagacatggtgcgaagagtcgattgagctagttagtagtcctccggcccctgaatc |
| | | cggctaatcctaactgcggagcacataccctcaacccagggggcattgtgtcgtaacgggtaact |
| | | ctgcagcggaaccgactactttgggtgtccgtgtttccttttattcttataatggctgcttatggtgaca |
| | | attgaaagattgttaccatatagctattggattggccatccggtgtctaacagagctattatatacctct |
| | | ttgttggatttgtaccacttgatctaaaggaagtcaagacactacaattcatcatacaattgaacacag |
| | | caaa |
| 692 | Coxsackie- | tttgtgcgcctgttttacaacccttccccaacttgtaacgtagaagtaatacacactactgatcaatag |
| | virus | caggcatggcgcgccagtcatgtctcgatcaagcacttctgttcccccggactgagtatcaataga |
| | A10 | ctgctcacgcggagaaggagaaaacgttcgttacccggctaactacttcgagaaacctagtagca |
| | | ccatagaagctgcagagtgtttcgctcagcacttcccccgtgtagatcaggctgatgagtcactgca |
| | | atccccacgggtgaccgtggcagtggctgcgttggcggcctgcctatggggcaacccataggac |
| | | gctctaatgtggacatggtgcgaagagtctattgagctagttagtagtcctccggcccctgaatgcg |
| | | gctaatcctaactgcggagcacatgccttcaacccagaaggtagtgtgtcgtaacgggcaactctg |
| | | cagcggaaccgactactttgggtgtccgtgtttctttttattcctatattggctgcttatggtgacaatca |
| | | cggaattgttgccatatagctattggattggccatccggtgtctaatagagctattgtgtacctatttgtt |
| | | ggatttactccgctatcacataaatctctgaacactttgtgctttatattgaacttaaacacccgaaa |

[1268] In some embodiments, an IRES of the invention is an IRES having a sequence as listed in Table 17 (SEQ ID NOs: 1-72 and 348-389). In some embodiments, an IRES is a Salivirus IRES. In some embodiments, an IRES is a Salivirus SZ1 IRES. In some embodiments, an IRES is a AP1.0 (SEQ ID NO:348). In some embodiments, an IRES is a CK1.0 (SEQ ID NO:349). In some embodiments, an IRES is a PV1.0 (SEQ ID NO:350). In some embodiments, an IRES is a SV1.0 (SEQ ID NO:351).

TABLE 18
Anabaena permutation site 5′ intron fragment sequences.

| SEQ | Permutation | |
|---|---|---|
| ID NO | site | Sequence |
| 73 | L2-1 | GAAGAAATTCTTTAAGTGGATGCTCTCAAACTCAGGGAAACC |
| | | TAAATCTAGTTATAGACAAGGCAATCCTGAGCCAAGCCGAAG |
| | | TAGTAATTAGTAAGTTAACAATAGATGACTTACAACTAATCG |
| | | GAAGGTGCAGAGACTCGACGGGAGCTACCCTAACGTCAAGAC |
| | | GAGGGTAAAGAGAGAGTCCAATTCTCAAAGCCAATAGGCAGT |
| | | AGCGAAAGCTGCAAGAGAATGAAAATCCGT |
| 74 | L2-2 | AAGAAATTCTTTAAGTGGATGCTCTCAAACTCAGGGAAACCT |
| | | AAATCTAGTTATAGACAAGGCAATCCTGAGCCAAGCCGAAGT |
| | | AGTAATTAGTAAGTTAACAATAGATGACTTACAACTAATCGG |
| | | AAGGTGCAGAGACTCGACGGGAGCTACCCTAACGTCAAGACG |
| | | AGGGTAAAGAGAGAGTCCAATTCTCAAAGCCAATAGGCAGTA |
| | | GCGAAAGCTGCAAGAGAATGAAAATCCGT |
| 75 | L2-3 | AGAAATTCTTTAAGTGGATGCTCTCAAACTCAGGGAAACCTA |
| | | AATCTAGTTATAGACAAGGCAATCCTGAGCCAAGCCGAAGTA |
| | | GTAATTAGTAAGTTAACAATAGATGACTTACAACTAATCGGA |
| | | AGGTGCAGAGACTCGACGGGAGCTACCCTAACGTCAAGACGA |
| | | GGGTAAAGAGAGAGTCCAATTCTCAAAGCCAATAGGCAGTAG |
| | | CGAAAGCTGCAAGAGAATGAAAATCCGT |
| 76 | L5-1 | GTTATAGACAAGGCAATCCTGAGCCAAGCCGAAGTAGTAATT |
| | | AGTAAGTTAACAATAGATGACTTACAACTAATCGGAAGGTGC |
| | | AGAGACTCGACGGGAGCTACCCTAACGTCAAGACGAGGGTAA |
| | | AGAGAGAGTCCAATTCTCAAAGCCAATAGGCAGTAGCGAAAG |
| | | CTGCAAGAGAATGAAAATCCGT |
| 77 | L5-2 | TTATAGACAAGGCAATCCTGAGCCAAGCCGAAGTAGTAATTA |
| | | GTAAGTTAACAATAGATGACTTACAACTAATCGGAAGGTGCA |
| | | GAGACTCGACGGGAGCTACCCTAACGTCAAGACGAGGGTAAA |
| | | GAGAGAGTCCAATTCTCAAAGCCAATAGGCAGTAGCGAAAGC |
| | | TGCAAGAGAATGAAAATCCGT |
| 78 | L5-3 | TATAGACAAGGCAATCCTGAGCCAAGCCGAAGTAGTAATTAG |
| | | TAAGTTAACAATAGATGACTTACAACTAATCGGAAGGTGCAG |
| | | AGACTCGACGGGAGCTACCCTAACGTCAAGACGAGGGTAAAG |
| | | AGAGAGTCCAATTCTCAAAGCCAATAGGCAGTAGCGAAAGCT |
| | | GCAAGAGAATGAAAATCCGT |
| 79 | L5-4 | ATAGACAAGGCAATCCTGAGCCAAGCCGAAGTAGTAATTAGT |
| | | AAGTTAACAATAGATGACTTACAACTAATCGGAAGGTGCAGA |
| | | GACTCGACGGGAGCTACCCTAACGTCAAGACGAGGGTAAAGA |
| | | GAGAGTCCAATTCTCAAAGCCAATAGGCAGTAGCGAAAGCTG |
| | | CAAGAGAATGAAAATCCGT |
| 80 | L5-5 | TAGACAAGGCAATCCTGAGCCAAGCCGAAGTAGTAATTAGTA |
| | | AGTTAACAATAGATGACTTACAACTAATCGGAAGGTGCAGAG |
| | | ACTCGACGGGAGCTACCCTAACGTCAAGACGAGGGTAAAGAG |
| | | AGAGTCCAATTCTCAAAGCCAATAGGCAGTAGCGAAAGCTGC |
| | | AAGAGAATGAAAATCCGT |
| 81 | L6-1 | ACAATAGATGACTTACAACTAATCGGAAGGTGCAGAGACTCG |
| | | ACGGGAGCTACCCTAACGTCAAGACGAGGGTAAAGAGAGAG |
| | | TCCAATTCTCAAAGCCAATAGGCAGTAGCGAAAGCTGCAAGA |
| | | GAATGAAAATCCGT |
| 82 | L6-2 | CAATAGATGACTTACAACTAATCGGAAGGTGCAGAGACTCGA |
| | | CGGGAGCTACCCTAACGTCAAGACGAGGGTAAAGAGAGAGTC |
| | | CAATTCTCAAAGCCAATAGGCAGTAGCGAAAGCTGCAAGAGA |
| | | ATGAAAATCCGT |
| 83 | L6-3 | AATAGATGACTTACAACTAATCGGAAGGTGCAGAGACTCGAC |
| | | GGGAGCTACCCTAACGTCAAGACGAGGGTAAAGAGAGAGTCC |
| | | AATTCTCAAAGCCAATAGGCAGTAGCGAAAGCTGCAAGAGAA |
| | | TGAAAATCCGT |
| 84 | L6-4 | ATAGATGACTTACAACTAATCGGAAGGTGCAGAGACTCGACG |
| | | GGAGCTACCCTAACGTCAAGACGAGGGTAAAGAGAGAGTCCA |
| | | ATTCTCAAAGCCAATAGGCAGTAGCGAAAGCTGCAAGAGAAT |
| | | GAAAATCCGT |
| 85 | L6-5 | TAGATGACTTACAACTAATCGGAAGGTGCAGAGACTCGACGG |
| | | GAGCTACCCTAACGTCAAGACGAGGGTAAAGAGAGAGTCCAA |
| | | TTCTCAAAGCCAATAGGCAGTAGCGAAAGCTGCAAGAGAATG |
| | | AAAATCCGT |
| 86 | L6-6 | AGATGACTTACAACTAATCGGAAGGTGCAGAGACTCGACGGG |
| | | AGCTACCCTAACGTCAAGACGAGGGTAAAGAGAGAGTCCAAT |
| | | TCTCAAAGCCAATAGGCAGTAGCGAAAGCTGCAAGAGAATGA |
| | | AAATCCGT |
| 87 | L6-7 | GATGACTTACAACTAATCGGAAGGTGCAGAGACTCGACGGGA |
| | | GCTACCCTAACGTCAAGACGAGGGTAAAGAGAGAGTCCAATT |
| | | CTCAAAGCCAATAGGCAGTAGCGAAAGCTGCAAGAGAATGA |
| | | AAATCCGT |
| 88 | L6-8 | ATGACTTACAACTAATCGGAAGGTGCAGAGACTCGACGGGAG |
| | | CTACCCTAACGTCAAGACGAGGGTAAAGAGAGAGTCCAATTC |
| | | TCAAAGCCAATAGGCAGTAGCGAAAGCTGCAAGAGAATGAA |
| | | AATCCGT |
| 89 | L6-9 | TGACTTACAACTAATCGGAAGGTGCAGAGACTCGACGGGAGC |
| | | TACCCTAACGTCAAGACGAGGGTAAAGAGAGAGTCCAATTCT |
| | | CAAAGCCAATAGGCAGTAGCGAAAGCTGCAAGAGAATGAAA |
| | | ATCCGT |
| 90 | L8-1 | CAAGACGAGGGTAAAGAGAGAGTCCAATTCTCAAAGCCAATA |
| | | GGCAGTAGCGAAAGCTGCAAGAGAATGAAAATCCGT |
| 91 | L8-2 | AAGACGAGGGTAAAGAGAGAGTCCAATTCTCAAAGCCAATAG |
| | | GCAGTAGCGAAAGCTGCAAGAGAATGAAAATCCGT |
| 92 | L8-3 | AGACGAGGGTAAAGAGAGAGTCCAATTCTCAAAGCCAATAGG |
| | | CAGTAGCGAAAGCTGCAAGAGAATGAAAATCCGT |
| 93 | L8-4 | GACGAGGGTAAAGAGAGAGTCCAATTCTCAAAGCCAATAGGC |
| | | AGTAGCGAAAGCTGCAAGAGAATGAAAATCCGT |
| 94 | L8-5 | ACGAGGGTAAAGAGAGAGTCCAATTCTCAAAGCCAATAGGCA |
| | | GTAGCGAAAGCTGCAAGAGAATGAAAATCCGT |
| 95 | L9a-1 | AATAGGCAGTAGCGAAAGCTGCAAGAGAATGAAAATCCGT |
| 96 | L9a-2 | ATAGGCAGTAGCGAAAGCTGCAAGAGAATGAAAATCCGT |
| 97 | L9a-3 | TAGGCAGTAGCGAAAGCTGCAAGAGAATGAAAATCCGT |
| 98 | L9a-4 | AGGCAGTAGCGAAAGCTGCAAGAGAATGAAAATCCGT |
| 99 | L9a-5 | GGCAGTAGCGAAAGCTGCAAGAGAATGAAAATCCGT |
| 100 | L9-1 | GAAAGCTGCAAGAGAATGAAAATCCGT |
| 101 | L9-2 | AAAGCTGCAAGAGAATGAAAATCCGT |
| 102 | L9-3 | AAGCTGCAAGAGAATGAAAATCCGT |
| 103 | L9-4 | AGCTGCAAGAGAATGAAAATCCGT |
| 104 | L9-5 | GCTGCAAGAGAATGAAAATCCGT |
| 105 | L9-6 | CTGCAAGAGAATGAAAATCCGT |
| 106 | L9-7 | AAGAGAATGAAAATCCGT |
| 107 | L9-8 | AGAGAATGAAAATCCGT |
| 108 | L9-9 | GAGAATGAAAATCCGT |
| 109 | L9a-6 | GCAGTAGCGAAAGCTGCAAGAGAATGAAAATCCGT |
| 110 | L9a-7 | AGTAGCGAAAGCTGCAAGAGAATGAAAATCCGT |
| 111 | L9a-8 | GTAGCGAAAGCTGCAAGAGAATGAAAATCCGT |

[1269] In some embodiments, a 5′ intron fragment is a fragment having a sequence listed in Table 18. Typically, a construct containing a 5′ intron fragment listed in Table 18 will contain a corresponding 3′ intron fragment as listed in Table 19 (e.g., both representing fragments with the L9a-8 permutation site).

TABLE 19
Anabaena permutation site 3' intron fragment sequences.

| SEQ | Permutation | |
|---|---|---|
| ID NO | site | Sequence |
| 112 | L2-1 | ACGGACTTAAATAATTGAGCCTTAAA |
| 113 | L2-2 | ACGGACTTAAATAATTGAGCCTTAAAG |
| 114 | L2-3 | ACGGACTTAAATAATTGAGCCTTAAAGA |
| 115 | L5-1 | ACGGACTTAAATAATTGAGCCTTAAAGAAGAAATTCTTTAAG |
| | | TGGATGCTCTCAAACTCAGGGAAACCTAAATCTA |
| 116 | L5-2 | ACGGACTTAAATAATTGAGCCTTAAAGAAGAAATTCTTTAAG |
| | | TGGATGCTCTCAAACTCAGGGAAACCTAAATCTAG |
| 117 | L5-3 | ACGGACTTAAATAATTGAGCCTTAAAGAAGAAATTCTTTAAG |
| | | TGGATGCTCTCAAACTCAGGGAAACCTAAATCTAGT |
| 118 | L5-4 | ACGGACTTAAATAATTGAGCCTTAAAGAAGAAATTCTTTAAG |
| | | TGGATGCTCTCAAACTCAGGGAAACCTAAATCTAGTT |
| 119 | L5-5 | ACGGACTTAAATAATTGAGCCTTAAAGAAGAAATTCTTTAAG |
| | | TGGATGCTCTCAAACTCAGGGAAACCTAAATCTAGTTA |
| 120 | L6-1 | ACGGACTTAAATAATTGAGCCTTAAAGAAGAAATTCTTTAAG |
| | | TGGATGCTCTCAAACTCAGGGAAACCTAAATCTAGTTATAGA |
| | | CAAGGCAATCCTGAGCCAAGCCGAAGTAGTAATTAGTAAGTT |
| | | A |
| 121 | L6-2 | ACGGACTTAAATAATTGAGCCTTAAAGAAGAAATTCTTTAAG |
| | | TGGATGCTCTCAAACTCAGGGAAACCTAAATCTAGTTATAGA |
| | | CAAGGCAATCCTGAGCCAAGCCGAAGTAGTAATTAGTAAGTT |
| | | AA |
| 122 | L6-3 | ACGGACTTAAATAATTGAGCCTTAAAGAAGAAATTCTTTAAG |
| | | TGGATGCTCTCAAACTCAGGGAAACCTAAATCTAGTTATAGA |
| | | CAAGGCAATCCTGAGCCAAGCCGAAGTAGTAATTAGTAAGTT |
| | | AAC |
| 123 | L6-4 | ACGGACTTAAATAATTGAGCCTTAAAGAAGAAATTCTTTAAG |
| | | TGGATGCTCTCAAACTCAGGGAAACCTAAATCTAGTTATAGA |
| | | CAAGGCAATCCTGAGCCAAGCCGAAGTAGTAATTAGTAAGTT |
| | | AACA |
| 124 | L6-5 | ACGGACTTAAATAATTGAGCCTTAAAGAAGAAATTCTTTAAG |
| | | TGGATGCTCTCAAACTCAGGGAAACCTAAATCTAGTTATAGA |
| | | CAAGGCAATCCTGAGCCAAGCCGAAGTAGTAATTAGTAAGTT |
| | | AACAA |
| 125 | L6-6 | ACGGACTTAAATAATTGAGCCTTAAAGAAGAAATTCTTTAAG |
| | | TGGATGCTCTCAAACTCAGGGAAACCTAAATCTAGTTATAGA |
| | | CAAGGCAATCCTGAGCCAAGCCGAAGTAGTAATTAGTAAGTT |
| | | AACAAT |
| 126 | L6-7 | ACGGACTTAAATAATTGAGCCTTAAAGAAGAAATTCTTTAAG |
| | | TGGATGCTCTCAAACTCAGGGAAACCTAAATCTAGTTATAGA |
| | | CAAGGCAATCCTGAGCCAAGCCGAAGTAGTAATTAGTAAGTT |
| | | AACAATA |
| 127 | L6-8 | ACGGACTTAAATAATTGAGCCTTAAAGAAGAAATTCTTTAAG |
| | | TGGATGCTCTCAAACTCAGGGAAACCTAAATCTAGTTATAGA |
| | | CAAGGCAATCCTGAGCCAAGCCGAAGTAGTAATTAGTAAGTT |
| | | AACAATAG |
| 128 | L6-9 | ACGGACTTAAATAATTGAGCCTTAAAGAAGAAATTCTTTAAG |
| | | TGGATGCTCTCAAACTCAGGGAAACCTAAATCTAGTTATAGA |
| | | CAAGGCAATCCTGAGCCAAGCCGAAGTAGTAATTAGTAAGTT |
| | | AACAATAGA |
| 129 | L8-1 | ACGGACTTAAATAATTGAGCCTTAAAGAAGAAATTCTTTAAG |
| | | TGGATGCTCTCAAACTCAGGGAAACCTAAATCTAGTTATAGA |
| | | CAAGGCAATCCTGAGCCAAGCCGAAGTAGTAATTAGTAAGTT |
| | | AACAATAGATGACTTACAACTAATCGGAAGGTGCAGAGACT |
| | | CGACGGGAGCTACCCTAACGT |
| 130 | L8-2 | ACGGACTTAAATAATTGAGCCTTAAAGAAGAAATTCTTTAAG |
| | | TGGATGCTCTCAAACTCAGGGAAACCTAAATCTAGTTATAGA |
| | | CAAGGCAATCCTGAGCCAAGCCGAAGTAGTAATTAGTAAGTT |
| | | AACAATAGATGACTTACAACTAATCGGAAGGTGCAGAGACT |
| | | CGACGGGAGCTACCCTAACGTC |
| 131 | L8-3 | ACGGACTTAAATAATTGAGCCTTAAAGAAGAAATTCTTTAAG |
| | | TGGATGCTCTCAAACTCAGGGAAACCTAAATCTAGTTATAGA |
| | | CAAGGCAATCCTGAGCCAAGCCGAAGTAGTAATTAGTAAGTT |
| | | AACAATAGATGACTTACAACTAATCGGAAGGTGCAGAGACT |
| | | CGACGGGAGCTACCCTAACGTCA |
| 132 | L8-4 | ACGGACTTAAATAATTGAGCCTTAAAGAAGAAATTCTTTAAG |
| | | TGGATGCTCTCAAACTCAGGGAAACCTAAATCTAGTTATAGA |
| | | CAAGGCAATCCTGAGCCAAGCCGAAGTAGTAATTAGTAAGTT |
| | | AACAATAGATGACTTACAACTAATCGGAAGGTGCAGAGACT |
| | | CGACGGGAGCTACCCTAACGTCAA |
| 133 | L8-5 | ACGGACTTAAATAATTGAGCCTTAAAGAAGAAATTCTTTAAG |
| | | TGGATGCTCTCAAACTCAGGGAAACCTAAATCTAGTTATAGA |
| | | CAAGGCAATCCTGAGCCAAGCCGAAGTAGTAATTAGTAAGTT |
| | | AACAATAGATGACTTACAACTAATCGGAAGGTGCAGAGACT |
| | | CGACGGGAGCTACCCTAACGTCAAG |
| 134 | L9a-1 | ACGGACTTAAATAATTGAGCCTTAAAGAAGAAATTCTTTAAG |
| | | TGGATGCTCTCAAACTCAGGGAAACCTAAATCTAGTTATAGA |
| | | CAAGGCAATCCTGAGCCAAGCCGAAGTAGTAATTAGTAAGTT |
| | | AACAATAGATGACTTACAACTAATCGGAAGGTGCAGAGACT |
| | | CGACGGGAGCTACCCTAACGTCAAGACGAGGGTAAAGAGAG |
| | | AGTCCAATTCTCAAAGCC |
| 135 | L9a-2 | ACGGACTTAAATAATTGAGCCTTAAAGAAGAAATTCTTTAAG |
| | | TGGATGCTCTCAAACTCAGGGAAACCTAAATCTAGTTATAGA |
| | | CAAGGCAATCCTGAGCCAAGCCGAAGTAGTAATTAGTAAGTT |
| | | AACAATAGATGACTTACAACTAATCGGAAGGTGCAGAGACT |
| | | CGACGGGAGCTACCCTAACGTCAAGACGAGGGTAAAGAGAG |
| | | AGTCCAATTCTCAAAGCCA |
| 136 | L9a-3 | ACGGACTTAAATAATTGAGCCTTAAAGAAGAAATTCTTTAAG |
| | | TGGATGCTCTCAAACTCAGGGAAACCTAAATCTAGTTATAGA |
| | | CAAGGCAATCCTGAGCCAAGCCGAAGTAGTAATTAGTAAGTT |
| | | AACAATAGATGACTTACAACTAATCGGAAGGTGCAGAGACT |
| | | CGACGGGAGCTACCCTAACGTCAAGACGAGGGTAAAGAGAG |
| | | AGTCCAATTCTCAAAGCCAA |
| 137 | L9a-4 | ACGGACTTAAATAATTGAGCCTTAAAGAAGAAATTCTTTAAG |
| | | TGGATGCTCTCAAACTCAGGGAAACCTAAATCTAGTTATAGA |
| | | CAAGGCAATCCTGAGCCAAGCCGAAGTAGTAATTAGTAAGTT |
| | | AACAATAGATGACTTACAACTAATCGGAAGGTGCAGAGACT |
| | | CGACGGGAGCTACCCTAACGTCAAGACGAGGGTAAAGAGAG |
| | | AGTCCAATTCTCAAAGCCAAT |
| 138 | L9a-5 | ACGGACTTAAATAATTGAGCCTTAAAGAAGAAATTCTTTAAG |
| | | TGGATGCTCTCAAACTCAGGGAAACCTAAATCTAGTTATAGA |
| | | CAAGGCAATCCTGAGCCAAGCCGAAGTAGTAATTAGTAAGTT |
| | | AACAATAGATGACTTACAACTAATCGGAAGGTGCAGAGACT |
| | | CGACGGGAGCTACCCTAACGTCAAGACGAGGGTAAAGAGAG |
| | | AGTCCAATTCTCAAAGCCAATA |
| 139 | L9-1 | ACGGACTTAAATAATTGAGCCTTAAAGAAGAAATTCTTTAAG |
| | | TGGATGCTCTCAAACTCAGGGAAACCTAAATCTAGTTATAGA |
| | | CAAGGCAATCCTGAGCCAAGCCGAAGTAGTAATTAGTAAGTT |
| | | AACAATAGATGACTTACAACTAATCGGAAGGTGCAGAGACT |
| | | CGACGGGAGCTACCCTAACGTCAAGACGAGGGTAAAGAGAG |
| | | AGTCCAATTCTCAAAGCCAATAGGCAGTAGC |
| 140 | L9-2 | ACGGACTTAAATAATTGAGCCTTAAAGAAGAAATTCTTTAAG |
| | | TGGATGCTCTCAAACTCAGGGAAACCTAAATCTAGTTATAGA |
| | | CAAGGCAATCCTGAGCCAAGCCGAAGTAGTAATTAGTAAGTT |
| | | AACAATAGATGACTTACAACTAATCGGAAGGTGCAGAGACT |
| | | CGACGGGAGCTACCCTAACGTCAAGACGAGGGTAAAGAGAG |
| | | AGTCCAATTCTCAAAGCCAATAGGCAGTAGCG |
| 141 | L9-3 | ACGGACTTAAATAATTGAGCCTTAAAGAAGAAATTCTTTAAG |
| | | TGGATGCTCTCAAACTCAGGGAAACCTAAATCTAGTTATAGA |
| | | CAAGGCAATCCTGAGCCAAGCCGAAGTAGTAATTAGTAAGTT |
| | | AACAATAGATGACTTACAACTAATCGGAAGGTGCAGAGACT |
| | | CGACGGGAGCTACCCTAACGTCAAGACGAGGGTAAAGAGAG |
| | | AGTCCAATTCTCAAAGCCAATAGGCAGTAGCGA |
| 142 | L9-4 | ACGGACTTAAATAATTGAGCCTTAAAGAAGAAATTCTTTAAG |
| | | TGGATGCTCTCAAACTCAGGGAAACCTAAATCTAGTTATAGA |
| | | CAAGGCAATCCTGAGCCAAGCCGAAGTAGTAATTAGTAAGTT |
| | | AACAATAGATGACTTACAACTAATCGGAAGGTGCAGAGACT |
| | | CGACGGGAGCTACCCTAACGTCAAGACGAGGGTAAAGAGAG |
| | | AGTCCAATTCTCAAAGCCAATAGGCAGTAGCGAA |
| 143 | L9-5 | ACGGACTTAAATAATTGAGCCTTAAAGAAGAAATTCTTTAAG |
| | | TGGATGCTCTCAAACTCAGGGAAACCTAAATCTAGTTATAGA |
| | | CAAGGCAATCCTGAGCCAAGCCGAAGTAGTAATTAGTAAGTT |
| | | AACAATAGATGACTTACAACTAATCGGAAGGTGCAGAGACT |
| | | CGACGGGAGCTACCCTAACGTCAAGACGAGGGTAAAGAGAG |
| | | AGTCCAATTCTCAAAGCCAATAGGCAGTAGCGAAA |
| 144 | L9-6 | ACGGACTTAAATAATTGAGCCTTAAAGAAGAAATTCTTTAAG |
| | | TGGATGCTCTCAAACTCAGGGAAACCTAAATCTAGTTATAGA |
| | | CAAGGCAATCCTGAGCCAAGCCGAAGTAGTAATTAGTAAGTT |
| | | AACAATAGATGACTTACAACTAATCGGAAGGTGCAGAGACT |
| | | CGACGGGAGCTACCCTAACGTCAAGACGAGGGTAAAGAGAG |
| | | AGTCCAATTCTCAAAGCCAATAGGCAGTAGCGAAAG |
| 145 | L9-7 | ACGGACTTAAATAATTGAGCCTTAAAGAAGAAATTCTTTAAG |
| | | TGGATGCTCTCAAACTCAGGGAAACCTAAATCTAGTTATAGA |
| | | CAAGGCAATCCTGAGCCAAGCCGAAGTAGTAATTAGTAAGTT |
| | | AACAATAGATGACTTACAACTAATCGGAAGGTGCAGAGACT |
| | | CGACGGGAGCTACCCTAACGTCAAGACGAGGGTAAAGAGAG |
| | | AGTCCAATTCTCAAAGCCAATAGGCAGTAGCGAAAGCTGC |
| 146 | L9-8 | ACGGACTTAAATAATTGAGCCTTAAAGAAGAAATTCTTTAAG |
| | | TGGATGCTCTCAAACTCAGGGAAACCTAAATCTAGTTATAGA |
| | | CAAGGCAATCCTGAGCCAAGCCGAAGTAGTAATTAGTAAGTT |
| | | AACAATAGATGACTTACAACTAATCGGAAGGTGCAGAGACT |
| | | CGACGGGAGCTACCCTAACGTCAAGACGAGGGTAAAGAGAG |
| | | AGTCCAATTCTCAAAGCCAATAGGCAGTAGCGAAAGCTGCA |
| 147 | L9-9 | ACGGACTTAAATAATTGAGCCTTAAAGAAGAAATTCTTTAAG |
| | | TGGATGCTCTCAAACTCAGGGAAACCTAAATCTAGTTATAGA |
| | | CAAGGCAATCCTGAGCCAAGCCGAAGTAGTAATTAGTAAGTT |
| | | AACAATAGATGACTTACAACTAATCGGAAGGTGCAGAGACT |
| | | CGACGGGAGCTACCCTAACGTCAAGACGAGGGTAAAGAGAG |
| | | AGTCCAATTCTCAAAGCCAATAGGCAGTAGCGAAAGCTGCA |
| | | A |
| 148 | L9a-6 | ACGGACTTAAATAATTGAGCCTTAAAGAAGAAATTCTTTAAG |
| | | TGGATGCTCTCAAACTCAGGGAAACCTAAATCTAGTTATAGA |
| | | CAAGGCAATCCTGAGCCAAGCCGAAGTAGTAATTAGTAAGTT |
| | | AACAATAGATGACTTACAACTAATCGGAAGGTGCAGAGACT |
| | | CGACGGGAGCTACCCTAACGTCAAGACGAGGGTAAAGAGAG |
| | | AGTCCAATTCTCAAAGCCAATAG |
| 149 | L9a-7 | ACGGACTTAAATAATTGAGCCTTAAAGAAGAAATTCTTTAAG |
| | | TGGATGCTCTCAAACTCAGGGAAACCTAAATCTAGTTATAGA |
| | | CAAGGCAATCCTGAGCCAAGCCGAAGTAGTAATTAGTAAGTT |
| | | AACAATAGATGACTTACAACTAATCGGAAGGTGCAGAGACT |
| | | CGACGGGAGCTACCCTAACGTCAAGACGAGGGTAAAGAGAG |
| | | AGTCCAATTCTCAAAGCCAATAGGC |
| 150 | L9a-8 | ACGGACTTAAATAATTGAGCCTTAAAGAAGAAATTCTTTAAG |
| | | TGGATGCTCTCAAACTCAGGGAAACCTAAATCTAGTTATAGA |
| | | CAAGGCAATCCTGAGCCAAGCCGAAGTAGTAATTAGTAAGTT |
| | | AACAATAGATGACTTACAACTAATCGGAAGGTGCAGAGACT |
| | | CGACGGGAGCTACCCTAACGTCAAGACGAGGGTAAAGAGAG |
| | | AGTCCAATTCTCAAAGCCAATAGGCA |

[1270] In some embodiments, a 3′ intron fragment is a fragment having a sequence listed in Table 19. In some embodiments, a construct containing a 3′ intron fragment listed in Table 19 will contain a corresponding 5′ intron fragment as listed in Table 18 (e.g., both representing fragments with the L9a-8 permutation site).

TABLE 20
Non-anabaena permutation site 5′ intron fragment sequences.

| SEQ | | |
|---|---|---|
| ID NO | Intron | Sequence |
| 151 | Azop1 | tgcgccgatgaaggtgtagagactagacggcacccacctaaggcaaacgctatggtgaaggcatagtcca |
| | | gggagtggcgaaagtcacacaaaccggaatccgt |
| 152 | Azop2 | ccgggcgtatggcaacgccgagccaagcttcggcgcctgcgccgatgaaggtgtagagactagacggc |
| | | acccacctaaggcaaacgctatggtgaaggcatagtccagggagtggcgaaagtcacacaaaccggaat |
| | | ccgt |
| 153 | Azop3 | acggcacccacctaaggcaaacgctatggtgaaggcatagtccagggagtggcgaaagtcacacaaacc |
| | | ggaatccgt |
| 154 | Azop4 | acgctatggtgaaggcatagtccagggagtggcgaaagtcacacaaaccggaatccgt |
| 155 | S7951p1 | attaaagttatagaattatcagagaatgatatagtccaagccttatggtaacatgagggcacttgaccctggta |
| | | g |
| 156 | Twortp1 | aagatgtaggcaatcctgagctaagctcttagtaataagagaaagtgcaacgactattccgataggaagtag |
| | | ggtcaagtgactcgaaatggggattaccattctagggtagtgatatagtctgaacatatatggaaacatatag |
| | | aaggataggagtaacgaacctattcgtaacataattgaacttttagttat |
| 157 | Twortp2 | taataagagaaagtgcaacgactattccgataggaagtagggtcaagtgactcgaaatggggattaccatc |
| | | tagggtagtgatatagtctgaacatatatggaaacatatagaaggataggagtaacgaacctattcgtaacat |
| | | aattgaacttttagttat |
| 158 | Twortp3 | taggaagtagggtcaagtgactcgaaatggggattacccttctagggtagtgatatagtctgaacatatatgg |
| | | aaacatatagaaggataggagtaacgaacctattcgtaacataattgaacttttagttat |
| 159 | Twortp4 | ctagggtagtgatatagtctgaacatatatggaaacatatagaaggataggagtaacgaacctattcgtaaca |
| | | taattgaacttttagttat |
| 160 | LSUp1 | agttaataaagatgatgaaatagtctgaaccattttgagaaaagtggaaataaaagaaaatcttttatgataac |
| | | ataaattgaacaggctaa |
| 161 | Phip1 | caaagactgatgatatagtccgacactcctagtaataggagaatacagaaaggatgaaatcc |
| 162 | Nostoc | agtcgagggtaaagggagagtccaattctcaaagcctattggcagtagcgaaagctgcgggagaatgaaa |
| | | atccgt |
| 163 | Nostoc | agccgagggtaaagggagagtccaattctcaaagccaataggcagtagcgaaagctgcgggagaatgaa |
| | | aatccgt |
| 164 | Nodularia | agccgagggtaaagggagagtccaattctcaaagccgaaggttattaaaacctggcagcagtgaaagctg |
| | | cgggagaatgaaaatccgt |
| 165 | Pleurocapsa | agctgagggtaaagagagagtccaattctcaaagccagcagatggcagtagcgaaagctgcgggagaat |
| | | gaaaatccgt |
| 166 | Planktothrix | agccgagggtaaagagagagtccaattctcaaagccaattggtagtagcgaaagctacgggagaatgaaa |
| | | atccgt |

[1271] In some embodiments, a 5′ intron fragment is a fragment having a sequence listed in Table 20. A construct containing a 5′ intron fragment listed in Table 20 will contain a corresponding 3′ intron fragment in Table 21 (e.g., both representing fragments with the Azop1 intron).

TABLE 21
Non-anabaena permutation site 3′ intron fragment sequences.

| SEQ | | |
|---|---|---|
| ID NO | Intron | Sequence |
| 167 | Azop1 | gcggactcatatttcgatgtgccttgcgccgggaaaccacgcaagggatggtgtcaaattcggcgaaac |
| | | ctaagcgcccgcccgggcgtatggcaacgccgagccaagcttcggcgcc |
| 168 | Azop2 | gcggactcatatttcgatgtgccttgcgccgggaaaccacgcaagggatggtgtcaaattcggcgaaac |
| | | ctaagcgcccgc |
| 169 | Azop3 | gcggactcatatttcgatgtgccttgcgccgggaaaccacgcaagggatggtgtcaaattcggcgaaac |
| | | ctaagcgcccgcccgggcgtatggcaacgccgagccaagcttcggcgcctgcgccgatgaaggtgta |
| | | gagactag |
| 170 | Azop4 | gcggactcatatttcgatgtgccttgcgccgggaaaccacgcaagggatggtgtcaaattcggcgaaac |
| | | ctaagcgcccgcccgggcgtatggcaacgccgagccaagcttcggcgcctgcgccgatgaaggtgta |
| | | gagactagacggcacccacctaaggcaa |
| 171 | S795p1 | aggattagatactacactaagtgtcccccagactggtgacagtctggtgtgcatccagctatatcggtgaa |
| | | accccattggggtaataccgagggaagctatattatatatatattaataaatagccccgtagagactatgta |
| | | ggtaaggagatagaagatgataaaatcaaaatcatc |
| 172 | Twortp1 | actactgaaagcataaataattgtgcctttatacagtaatgtatatcgaaaaatcctctaattcagggaacac |
| | | ctaaacaaact |
| 173 | Twortp2 | actactgaaagcataaataattgtgcctttatacagtaatgtatatcgaaaaatcctctaattcagggaacac |
| | | ctaaacaaactaagatgtaggcaatcctgagctaagctcttag |
| 174 | Twortp3 | actactgaaagcataaataattgtgcctttatacagtaatgtatatcgaaaaatcctctaattcagggaacac |
| | | ctaaacaaactaagatgtaggcaatcctgagctaagctcttagtaataagagaaagtgcaacgactattcc |
| | | ga |
| 175 | Twortp4 | actactgaaagcataaataattgtgcctttatacagtaatgtatatcgaaaaatcctctaattcagggaacac |
| | | ctaaacaaactaagatgtaggcaatcctgagctaagctcttagtaataagagaaagtgcaacgactattcc |
| | | gataggaagtagggtcaagtgactcgaaatggggattaccctt |
| 176 | LSUp1 | cgctagggatttataactgtgagtcctccaatattataaaatgttggtaatatattgggtaaatttcaaagaca |
| | | acttttctccacgtcaggatatagtgtatttgaagcgaaacttattttagcagtgaaaaagcaaataaggac |
| | | gttcaacgactaaaaggtgagtattgctaacaataatccttttttttaatgcccaacatctttattaact |
| 177 | Phip1 | gtgggtgcataaactatttcattgtgcacattaaatctggtgaactcggtgaaaccctaatggggcaatacc |
| | | gagccaagccatagggaggatatatgagaggcaagaagttaattcttgaggccactgagactggctgta |
| | | tcatccctacgtcacacaaacttaatgccgatggttatttcagaaagaaaaccaatggcgtcttagagatgt |
| | | atcacagaacggtgtggaaggagcataacggagacatacctgatggcttcgagatagaccataagtgtc |
| | | gcaatagggcttgctgtaatatagagcatttacagatgcttgagggtacagcccacactgttaagaccaat |
| | | cgtgaacgctacgcagacagaaaggaaacagctagggaatactggctggagactggatgtaccggcc |
| | | tagcactcggtgagaagtttggtgtgtcgttctcttctgcttgtaagtggattagagaatggaaggcgtaga |
| | | gactatccgaaaggagtagggccgagggtgagactccctcgtaacccgaagcgccagacagtcaact |
| 178 | Nostoc | acggacttaagtaattgagccttaaagaagaaattctttaagtggcagctctcaaactcagggaaacctaa |
| | | atctgttcacagacaaggcaatcctgagccaagccgaaagagtcatgagtgctgagtagtgagtaaaat |
| | | aaaagctcacaactcagaggttgtaactctaagctagtcggaaggtgcagagactcgacgggagctac |
| | | cctaacgtaa |
| 179 | Nostoc | acggacttaaactgaattgagccttagagaagaaattctttaagtgtcagctctcaaactcagggaaacct |
| | | aaatctgttgacagacaaggcaatcctgagccaagccgagaactctaagttattcggaaggtgcagaga |
| | | ctcgacgggagctaccctaacgtca |
| 180 | Nodularia | acggacttagaaaactgagccttgatcgagaaatctttcaagtggaagctctcaaattcagggaaacctaa |
| | | atctgtttacagatatggcaatcctgagccaagccgaaacaagtcctgagtgttaaagctcataactcatc |
| | | ggaaggtgcagagactcgacgggagctaccctaacgtta |
| 181 | Pleurocapsa | acggacttaaaaaaattgagccttggcagagaaatctgtcatgcgaacgctctcaaattcagggaaacct |
| | | aagtctggcaacagatatggcaatcctgagccaagccttaatcaaggaaaaaaacatttttaccttttacctt |
| | | gaaaggaaggtgcagagactcaacgggagctaccctaacaggtca |
| 182 | Planktothrix | acggacttaaagataaattgagccttgaggcgagaaatctctcaagtgtaagctgtcaaattcagggaaa |
| | | cctaaatctgtaaattcagacaaggcaatcctgagccaagcctaggggtattagaaatgagggagtttcc |
| | | ccaatctaagatcaatacctaggaaggtgcagagactcgacgggagctaccctaacgtta |

[1272] In some embodiments, a 3′ intron fragment is a fragment having a sequence listed in Table 21. A construct containing a 3′ intron fragment listed in Table 21 will contain the corresponding 5′ intron fragment as listed in Table 20 (e.g., both representing fragments with the Azop1 intron).

TABLE 22
Spacer and Anabaena 5′ intron fragment sequences.

| SEQ | | |
|---|---|---|
| ID NO | Spacer | Sequence |
| 183 | T25 L10 | agtatataagaaacaaaccacTAGATGACTTACAACTAATCGGAAGGTGC |
| | | AGAGACTCGACGGGAGCTACCCTAACGTCAAGACGAGGGTAA |
| | | AGAGAGAGTCCAATTCTCAAAGCCAATAGGCAGTAGCGAAAG |
| | | CTGCAAGAGAATGAAAATCCGTggctcgcagc |
| 184 | T25L20 | ctgaaattatacttatactcaaacaaaccacTAGATGACTTACAACTAATCGGAA |
| | | GGTGCAGAGACTCGACGGGAGCTACCCTAACGTCAAGACGAG |
| | | GGTAAAGAGAGAGTCCAATTCTCAAAGCCAATAGGCAGTAGC |
| | | GAAAGCTGCAAGAGAATGAAAATCCGTggctcgcagc |
| 185 | T25 L30 | ctgaaattatacttatactcagtatatgacaaacaaaccacTAGATGACTTACAACTAA |
| | (I80-10) | TCGGAAGGTGCAGAGACTCGACGGGAGCTACCCTAACGTCAA |
| | [Control] | GACGAGGGTAAAGAGAGAGTCCAATTCTCAAAGCCAATAGGC |
| | | AGTAGCGAAAGCTGCAAGAGAATGAAAATCCGTggctcgcagc |
| 186 | T25 L40 | catcaacaatatgaaattatacttatactcagtatatgacaaacaaaccacTAGATGACTTAC |
| | | AACTAATCGGAAGGTGCAGAGACTCGACGGGAGCTACCCTAA |
| | | CGTCAAGACGAGGGTAAAGAGAGAGTCCAATTCTCAAAGCCA |
| | | ATAGGCAGTAGCGAAAGCTGCAAGAGAATGAAAATCCGTggct |
| | | cgcagc |
| 187 | T25 L50 | catcaacaatatgaaactatacttatactcagtatatgaagcattatcgcaaacaaaccacTAGATG |
| | | ACTTACAACTAATCGGAAGGTGCAGAGACTCGACGGGAGCTA |
| | | CCCTAACGTCAAGACGAGGGTAAAGAGAGAGTCCAATTCTCA |
| | | AAGCCAATAGGCAGTAGCGAAAGCTGCAAGAGAATGAAAAT |
| | | CCGTggctcgcagc |
| 188 | T50 L10 | tagcgtcagcaaacaaacaaaTAGATGACTTACAACTAATCGGAAGGTGC |
| | | AGAGACTCGACGGGAGCTACCCTAACGTCAAGACGAGGGTAA |
| | | AGAGAGAGTCCAATTCTCAAAGCCAATAGGCAGTAGCGAAAG |
| | | CTGCAAGAGAATGAAAATCCGTggctcgcagc |
| 189 | T50 L20 | atactcatactagcgtcagcaaacaaacaaaTAGATGACTTACAACTAATCGGA |
| | | AGGTGCAGAGACTCGACGGGAGCTACCCTAACGTCAAGACGA |
| | | GGGTAAAGAGAGAGTCCAATTCTCAAAGCCAATAGGCAGTAG |
| | | CGAAAGCTGCAAGAGAATGAAAATCCGTggctcgcagc |
| 190 | T50 L30 | gtgtgaagctatactcatactagcgtcagcaaacaaacaaaTAGATGACTTACAACTA |
| | | ATCGGAAGGTGCAGAGACTCGACGGGAGCTACCCTAACGTCA |
| | | AGACGAGGGTAAAGAGAGAGTCCAATTCTCAAAGCCAATAGG |
| | | CAGTAGCGAAAGCTGCAAGAGAATGAAAATCCGTggctcgcagc |
| 191 | T50 L40 | cctcacctgagtgtgaagctatactcatactagcgtcagcaaacaaacaaaTAGATGACTTA |
| | | CAACTAATCGGAAGGTGCAGAGACTCGACGGGAGCTACCCTA |
| | | ACGTCAAGACGAGGGTAAAGAGAGAGTCCAATTCTCAAAGCC |
| | | AATAGGCAGTAGCGAAAGCTGCAAGAGAATGAAAATCCGTgg |
| | | ctcgcagc |
| 192 | T50 L50 | ccgaatgatgcctcacctgagtgtgaagctatactcatactagcgtcagcaaacaaacaaaTAGAT |
| | | GACTTACAACTAATCGGAAGGTGCAGAGACTCGACGGGAGCT |
| | | ACCCTAACGTCAAGACGAGGGTAAAGAGAGAGTCCAATTCTC |
| | | AAAGCCAATAGGCAGTAGCGAAAGCTGCAAGAGAATGAAAA |
| | | TCCGTggctcgcagc |
| 193 | T75 L10 | cggtgcgagcaaacaaacaaaTAGATGACTTACAACTAATCGGAAGGTG |
| | | CAGAGACTCGACGGGAGCTACCCTAACGTCAAGACGAGGGTA |
| | | AAGAGAGAGTCCAATTCTCAAAGCCAATAGGCAGTAGCGAAA |
| | | GCTGCAAGAGAATGAAAATCCGTggctcgcagc |
| 194 | T75 L20 | cgctccgacccagtgcgagcaaacaaacaaaTAGATGACTTACAACTAATCGG |
| | | AAGGTGCAGAGACTCGACGGGAGCTACCCTAACGTCAAGACG |
| | | AGGGTAAAGAGAGAGTCCAATTCTCAAAGCCAATAGGCAGTA |
| | | GCGAAAGCTGCAAGAGAATGAAAATCCGTggctcgcagc |
| 195 | T25 L30 | ctgaaattatactAatactcagtatatgacaaacaaaccacTAGATGACTTACAACTAA |
| | 1 MM | TCGGAAGGTGCAGAGACTCGACGGGAGCTACCCTAACGTCAA |
| | | GACGAGGGTAAAGAGAGAGTCCAATTCTCAAAGCCAATAGGC |
| | | AGTAGCGAAAGCTGCAAGAGAATGAAAATCCGTggctcgcagc |
| 196 | T25 L30 | ctgaaaAtatactAatactcaCtatatgacaaacaaaccacTAGATGACTTACAACTA |
| | 3 MM | ATCGGAAGGTGCAGAGACTCGACGGGAGCTACCCTAACGTCA |
| | | AGACGAGGGTAAAGAGAGAGTCCAATTCTCAAAGCCAATAGG |
| | | CAGTAGCGAAAGCTGCAAGAGAATGAAAATCCGTggctcgcagc |
| 197 | T25 L30 | ctgaTaAtataGtAatactcaCtatatgacaaacaaaccacTAGATGACTTACAACT |
| | 5 MM | AATCGGAAGGTGCAGAGACTCGACGGGAGCTACCCTAACGTC |
| | | AAGACGAGGGTAAAGAGAGAGTCCAATTCTCAAAGCCAATAG |
| | | GCAGTAGCGAAAGCTGCAAGAGAATGAAAATCCGTggctcgcagc |
| 198 | T25 L30 | ctgaTaAtaAaGtAatacAcaCtataAgacaaacaaaccacTAGATGACTTACAA |
| | 8 MM | CTAATCGGAAGGTGCAGAGACTCGACGGGAGCTACCCTAACG |
| | | TCAAGACGAGGGTAAAGAGAGAGTCCAATTCTCAAAGCCAAT |
| | | AGGCAGTAGCGAAAGCTGCAAGAGAATGAAAATCCGTggctcgc |
| | | agc |
| 199 | T25 L30 | ctgaaattatacttatactctctaagttacaaacaaaccacTAGATGACTTACAACTAAT |
| | OffTarget 10 | CGGAAGGTGCAGAGACTCGACGGGAGCTACCCTAACGTCAAG |
| | | ACGAGGGTAAAGAGAGAGTCCAATTCTCAAAGCCAATAGGCA |
| | | GTAGCGAAAGCTGCAAGAGAATGAAAATCCGTggctcgcagc |
| 200 | T25 L30 | ctgaaattatgtgtgttacAtctaagttacaaacaaaccacTAGATGACTTACAACTAA |
| | OffTarget 20 | TCGGAAGGTGCAGAGACTCGACGGGAGCTACCCTAACGTCAA |
| | | GACGAGGGTAAAGAGAGAGTCCAATTCTCAAAGCCAATAGGC |
| | | AGTAGCGAAAGCTGCAAGAGAATGAAAATCCGTggctcgcagc |
| 201 | T25 L30 | gagatcggtgtgtgttacAtctaagttacaaacaaaccacTAGATGACTTACAACTAA |
| | OffTarget 30 | TCGGAAGGTGCAGAGACTCGACGGGAGCTACCCTAACGTCAA |
| | | GACGAGGGTAAAGAGAGAGTCCAATTCTCAAAGCCAATAGGC |
| | | AGTAGCGAAAGCTGCAAGAGAATGAAAATCCGTggctcgcagc |
| 202 | T25 L30 | ctgaaattatacttatactcagtatatgacaaacaaaccacTAGATGACTTACAACTAA |
| | I25-10 | TCGGAAGGTGCAGAGACTCGACGGGAGCTACCCTAACGTCAA |
| | | GACGAGGGTAAAGAGAGAGTCCAATTCTCAAAGCCAATAGGC |
| | | AGTAGCGAAAGCTGCAAGAGAATGAAAATCCGTgattaaacag |
| 203 | T25 L30 | ctgaaattatacttatactcagtatatgacaaacaaaccacTAGATGACTTACAACTAA |
| | I25-20 | TCGGAAGGTGCAGAGACTCGACGGGAGCTACCCTAACGTCAA |
| | | GACGAGGGTAAAGAGAGAGTCCAATTCTCAAAGCCAATAGGC |
| | | AGTAGCGAAAGCTGCAAGAGAATGAAAATCCGTgattcacaatataaa |
| | | ttacg |
| 204 | T25 L30 | ctgaaattatacttatactcagtatatgacaaacaaaccacTAGATGACTTACAACTAA |
| | I50-10 | TCGGAAGGTGCAGAGACTCGACGGGAGCTACCCTAACGTCAA |
| | | GACGAGGGTAAAGAGAGAGTCCAATTCTCAAAGCCAATAGGC |
| | | AGTAGCGAAAGCTGCAAGAGAATGAAAATCCGTggatcatagc |
| 205 | T25 L30 | ctgaaattatacttatactcagtatatgacaaacaaaccacTAGATGACTTACAACTAA |
| | I50-20 | TCGGAAGGTGCAGAGACTCGACGGGAGCTACCCTAACGTCAA |
| | | GACGAGGGTAAAGAGAGAGTCCAATTCTCAAAGCCAATAGGC |
| | | AGTAGCGAAAGCTGCAAGAGAATGAAAATCCGTggatcgcagcataa |
| | | tatccg |
| 206 | T25 L30 | ctgaaattatacttatactcagtatatgacaaacaaaccacTAGATGACTTACAACTAA |
| | I80-20 | TCGGAAGGTGCAGAGACTCGACGGGAGCTACCCTAACGTCAA |
| | | GACGAGGGTAAAGAGAGAGTCCAATTCTCAAAGCCAATAGGC |
| | | AGTAGCGAAAGCTGCAAGAGAATGAAAATCCGTggctcgcagcgcg |
| | | cctaccg |
| 207 | T25 L30 | ctgaaattatacttatactcagtatatgacaaacaaaccacTAGATGACTTACAACTAA |
| | I80-20x2 | TCGGAAGGTGCAGAGACTCGACGGGAGCTACCCTAACGTCAA |
| | | GACGAGGGTAAAGAGAGAGTCCAATTCTCAAAGCCAATAGGC |
| | | AGTAGCGAAAGCTGCAAGAGAATGAAAATCCGTggctcgcagcgcg |
| | | cctaccgaaagccggcgtcgacgttagcgc |
| 208 | T25 L30 | ctgaaattatacttatactcagtatatgacaaacaaaccacTAGATGACTTACAACTAA |
| | I50-20x2 | TCGGAAGGTGCAGAGACTCGACGGGAGCTACCCTAACGTCAA |
| | | GACGAGGGTAAAGAGAGAGTCCAATTCTCAAAGCCAATAGGC |
| | | AGTAGCGAAAGCTGCAAGAGAATGAAAATCCGTggatcgcagcataa |
| | | tatccgaaacgaggatacaagtgacatgc |
| 209 | T25 L30 | ctgaaattatacttatactcagtatatgacaaacaaaccacTAGATGACTTACAACTAA |
| | I25-20x2 | TCGGAAGGTGCAGAGACTCGACGGGAGCTACCCTAACGTCAA |
| | | GACGAGGGTAAAGAGAGAGTCCAATTCTCAAAGCCAATAGGC |
| | | AGTAGCGAAAGCTGCAAGAGAATGAAAATCCGTgattcacaatctaaa |
| | | ttacgaaacgataaatgataactctaac |
| 210 | T0 L0 | aaacaaaccacTAGATGACTTACAACTAATCGGAAGGTGCAGAGAC |
| | | TCGACGGGAGCTACCCTAACGTCAAGACGAGGGTAAAGAGAG |
| | | AGTCCAATTCTCAAAGCCAATAGGCAGTAGCGAAAGCTGCAA |
| | | GAGAATGAAAATCCGTggctcgcagc |
| 211 | T100 L5 | cgggcaaacaaacaaaTAGATGACTTACAACTAATCGGAAGGTGCAG |
| | | AGACTCGACGGGAGCTACCCTAACGTCAAGACGAGGGTAAAG |
| | | AGAGAGTCCAATTCTCAAAGCCAATAGGCAGTAGCGAAAGCT |
| | | GCAAGAGAATGAAAATCCGTggctcgcagc |
| 212 | T75 L30 | cgctccgacgagatccggccagtgcgagcaaacaaacaaaTAGATGACTTACAACT |
| | | AATCGGAAGGTGCAGAGACTCGACGGGAGCTACCCTAACGTC |
| | | AAGACGAGGGTAAAGAGAGAGTCCAATTCTCAAAGCCAATAG |
| | | GCAGTAGCGAAAGCTGCAAGAGAATGAAAATCCGTggctcgcagc |
| 213 | T0 L0a | aaacaaaccacGGCAGTAGCGAAAGCTGCAAGAGAATGAAAATCC |
| | | GTggctcgcagc |
| 214 | T25 L10a | agtatataagaaacaaaccacGGCAGTAGCGAAAGCTGCAAGAGAATGA |
| | | AAATCCGTggctcgcagc |
| 215 | T25 L20a | ctgaaattatacttatactcaaacaaaccacGGCAGTAGCGAAAGCTGCAAGAG |
| | | AATGAAAATCCGTggctcgcagc |
| 216 | T25 L30a | ctgaaattatacttatactcagtatatgacaaacaaaccacGGCAGTAGCGAAAGCTGC |
| | (I80-10) | AAGAGAATGAAAATCCGTggctcgcagc |
| | [Control] | |
| 217 | T50 L10a | tagcgtcagcaaacaaacaaaGGCAGTAGCGAAAGCTGCAAGAGAATGA |
| | | AAATCCGTggctcgcagc |
| 218 | T50 L20a | atactcatactagcgtcagcaaacaaacaaaGGCAGTAGCGAAAGCTGCAAGAG |
| | | AATGAAAATCCGTggctcgcagc |
| 219 | T50 L30a | gtgtgaagctatactcatactagcgtcagcaaacaaacaaaGGCAGTAGCGAAAGCTG |
| | | CAAGAGAATGAAAATCCGTggctcgcagc |
| 220 | T75 L10a | cggtgcgagcaaacaaacaaaGGCAGTAGCGAAAGCTGCAAGAGAATGA |
| | | AAATCCGTggctcgcagc |
| 221 | T75 L20a | cgctccgacccagtgcgagcaaacaaacaaaGGCAGTAGCGAAAGCTGCAAGA |
| | | GAATGAAAATCCGTggctcgcagc |
| 222 | T75 L30a | cgctccgacgagatccggccagtgcgagcaaacaaacaaaGGCAGTAGCGAAAGCT |
| | | GCAAGAGAATGAAAATCCGTggctcgcagc |
| 223 | T0 L0b | aaacaaaccacAAGACGAGGGTAAAGAGAGAGTCCAATTCTCAAA |
| | | GCCAATAGGCAGTAGCGAAAGCTGCAAGAGAATGAAAATCC |
| | | GTggctcgcagc |
| 224 | T25 L10b | agtatataagaaacaaaccacAAGACGAGGGTAAAGAGAGAGTCCAATTC |
| | | TCAAAGCCAATAGGCAGTAGCGAAAGCTGCAAGAGAATGAA |
| | | AATCCGTggctcgcagc |
| 225 | T25 L20b | ctgaaattatacttatactcaaacaaaccacAAGACGAGGGTAAAGAGAGAGTC |
| | | CAATTCTCAAAGCCAATAGGCAGTAGCGAAAGCTGCAAGAGA |
| | | ATGAAAATCCGTggctcgcagc |
| 226 | T25 L30b | ctgaaattatacttatactcagtatatgacaaacaaaccacAAGACGAGGGTAAAGAG |
| | (I80-10) | AGAGTCCAATTCTCAAAGCCAATAGGCAGTAGCGAAAGCTGC |
| | [Control] | AAGAGAATGAAAATCCGTggctcgcagc |
| 227 | T50 L10b | tagcgtcagcaaacaaacaaaAAGACGAGGGTAAAGAGAGAGTCCAATT |
| | | CTCAAAGCCAATAGGCAGTAGCGAAAGCTGCAAGAGAATGA |
| | | AAATCCGTggctcgcagc |
| 228 | T50 L20b | atactcatactagcgtcagcaaacaaacaaaAAGACGAGGGTAAAGAGAGAGT |
| | | CCAATTCTCAAAGCCAATAGGCAGTAGCGAAAGCTGCAAGAG |
| | | AATGAAAATCCGTggctcgcagc |
| 229 | T50 L30b | gtgtgaagctatactcatactagcgtcagcaaacaaacaaaAAGACGAGGGTAAAGA |
| | | GAGAGTCCAATTCTCAAAGCCAATAGGCAGTAGCGAAAGCTG |
| | | CAAGAGAATGAAAATCCGTggctcgcagc |
| 230 | T75 L10b | cggtgcgagcaaacaaacaaaAAGACGAGGGTAAAGAGAGAGTCCAATT |
| | | CTCAAAGCCAATAGGCAGTAGCGAAAGCTGCAAGAGAATGA |
| | | AAATCCGTggctcgcagc |
| 231 | T75 L20b | cgctccgacccagtgcgagcaaacaaacaaaAAGACGAGGGTAAAGAGAGAG |
| | | TCCAATTCTCAAAGCCAATAGGCAGTAGCGAAAGCTGCAAGA |
| | | GAATGAAAATCCGTggctcgcagc |
| 232 | T75 L30b | cgctccgacgagatccggccagtgcgagcaaacaaacaaaAAGACGAGGGTAAAG |
| | | AGAGAGTCCAATTCTCAAAGCCAATAGGCAGTAGCGAAAGCT |
| | | GCAAGAGAATGAAAATCCGTggctcgcagc |
| 233 | T25 L30 | ctgaaattatacttatactcagtatatgacaaacaaaccacTAGATGACTTACAACTAA |
| | I0-0 | TCGGAAGGTGCAGAGACTCGACGGGAGCTACCCTAACGTCAA |
| | | GACGAGGGTAAAGAGAGAGTCCAATTCTCAAAGCCAATAGGC |
| | | AGTAGCGAAAGCTGCAAGAGAATGAAAATCCGT |
| 234 | T25 L30a | ctgaaattatacttatactcagtatatgacaaacaaaccacGGCAGTAGCGAAAGCTGC |
| | I0-0 | AAGAGAATGAAAATCCGT |
| 235 | T25 L30a | ctgaaattatacttatactcagtatatgacaaacaaaccacGGCAGTAGCGAAAGCTGC |
| | I25-10 | AAGAGAATGAAAATCCGTgattaaacag |
| 236 | T25 L30a | ctgaaattatacttatactcagtatatgacaaacaaaccacGGCAGTAGCGAAAGCTGC |
| | I25-20 | AAGAGAATGAAAATCCGTgattcacaatataaattacg |
| 237 | T25 L30a | ctgaaattatacttatactcagtatatgacaaacaaaccacGGCAGTAGCGAAAGCTGC |
| | I50-10 | AAGAGAATGAAAATCCGTggatcatagc |
| 238 | T25 L30a | ctgaaattatacttatactcagtatatgacaaacaaaccacGGCAGTAGCGAAAGCTGC |
| | I50-20 | AAGAGAATGAAAATCCGTggatcgcagcataatatccg |
| 239 | T25 L30a | ctgaaattatacttatactcagtatatgacaaacaaaccacGGCAGTAGCGAAAGCTGC |
| | I80-20 | AAGAGAATGAAAATCCGTggctcgcagcgcgcctaccg |
| 240 | T25 L30b | ctgaaattatacttatactcagtatatgacaaacaaaccacAAGACGAGGGTAAAGAG |
| | I0-0 | AGAGTCCAATTCTCAAAGCCAATAGGCAGTAGCGAAAGCTGC |
| | | AAGAGAATGAAAATCCGT |
| 241 | T25 L30b | ctgaaattatacttatactcagtatatgacaaacaaaccacAAGACGAGGGTAAAGAG |
| | I25-10 | AGAGTCCAATTCTCAAAGCCAATAGGCAGTAGCGAAAGCTGC |
| | | AAGAGAATGAAAATCCGTgattaaacag |
| 242 | T25 L30b | ctgaaattatacttatactcagtatatgacaaacaaaccacAAGACGAGGGTAAAGAG |
| | I25-20 | AGAGTCCAATTCTCAAAGCCAATAGGCAGTAGCGAAAGCTGC |
| | | AAGAGAATGAAAATCCGTgattcacaatataaattacg |
| 243 | T25 L30b | ctgaaattatacttatactcagtatatgacaaacaaaccacAAGACGAGGGTAAAGAG |
| | I50-10 | AGAGTCCAATTCTCAAAGCCAATAGGCAGTAGCGAAAGCTGC |
| | | AAGAGAATGAAAATCCGTggatcatagc |
| 244 | T25 L30b | ctgaaattatacttatactcagtatatgacaaacaaaccacAAGACGAGGGTAAAGAG |
| | I50-20 | AGAGTCCAATTCTCAAAGCCAATAGGCAGTAGCGAAAGCTGC |
| | | AAGAGAATGAAAATCCGTggatcgcagcataatatccg |
| 245 | T25 L30b | ctgaaattatacttatactcagtatatgacaaacaaaccacAAGACGAGGGTAAAGAG |
| | I80-20 | AGAGTCCAATTCTCAAAGCCAATAGGCAGTAGCGAAAGCTGC |
| | | AAGAGAATGAAAATCCGTggctcgcagcgcgcctaccg |

[1273] In some embodiments, a spacer and 5′ intron fragment are spacers and fragments having sequences as listed in Table 22.

TABLE 23
Spacer and Anabaena 3′ intron fragment sequences.

| SEQ | | |
|---|---|---|
| ID NO | Spacer | Sequence |
| 246 | T25 L10 | gctgcgagccACGGACTTAAATAATTGAGCCTTAAAGAAGAAATTC |
| | | TTTAAGTGGATGCTCTCAAACTCAGGGAAACCTAAATCTAGTT |
| | | ATAGACAAGGCAATCCTGAGCCAAGCCGAAGTAGTAATTAGT |
| | | AAGTTAACAAcacaaacacaacttatatact |
| 247 | T25 L20 | gctgcgagccACGGACTTAAATAATTGAGCCTTAAAGAAGAAATTC |
| | | TTTAAGTGGATGCTCTCAAACTCAGGGAAACCTAAATCTAGTT |
| | | ATAGACAAGGCAATCCTGAGCCAAGCCGAAGTAGTAATTAGT |
| | | AAGTTAACAAcacaaacacaagagtataagtataatttcag |
| 248 | T25 L30 | gctgcgagccACGGACTTAAATAATTGAGCCTTAAAGAAGAAATTC |
| | (I80-10) | TTTAAGTGGATGCTCTCAAACTCAGGGAAACCTAAATCTAGTT |
| | [Control] | ATAGACAAGGCAATCCTGAGCCAAGCCGAAGTAGTAATTAGT |
| | | AAGTTAACAAcacaaacacaagtcatatactgagtataagtataatttcag |
| 249 | T25 L40 | gctgcgagccACGGACTTAAATAATTGAGCCTTAAAGAAGAAATTC |
| | | TTTAAGTGGATGCTCTCAAACTCAGGGAAACCTAAATCTAGTT |
| | | ATAGACAAGGCAATCCTGAGCCAAGCCGAAGTAGTAATTAGT |
| | | AAGTTAACAAcacaaacacaagtcatatactgagtataagtataatttcatattgttgatg |
| 250 | T25 L50 | gctgcgagccACGGACTTAAATAATTGAGCCTTAAAGAAGAAATTC |
| | | TTTAAGTGGATGCTCTCAAACTCAGGGAAACCTAAATCTAGTT |
| | | ATAGACAAGGCAATCCTGAGCCAAGCCGAAGTAGTAATTAGT |
| | | AAGTTAACAAcacaaacacaagcgataatgcttcatatactgagtataagtatagatcatattg |
| | | ttgatg |
| 251 | T50 L10 | gctgcgagccACGGACTTAAATAATTGAGCCTTAAAGAAGAAATTC |
| | | TTTAAGTGGATGCTCTCAAACTCAGGGAAACCTAAATCTAGTT |
| | | ATAGACAAGGCAATCCTGAGCCAAGCCGAAGTAGTAATTAGT |
| | | AAGTTAACAAaacaaaaacaagctgacgcta |
| 252 | T50 L20 | gctgcgagccACGGACTTAAATAATTGAGCCTTAAAGAAGAAATTC |
| | | TTTAAGTGGATGCTCTCAAACTCAGGGAAACCTAAATCTAGTT |
| | | ATAGACAAGGCAATCCTGAGCCAAGCCGAAGTAGTAATTAGT |
| | | AAGTTAACAAaacaaaaacaagctgacgctagtatgagtat |
| 253 | T50 L30 | gctgcgagccACGGACTTAAATAATTGAGCCTTAAAGAAGAAATTC |
| | | TTTAAGTGGATGCTCTCAAACTCAGGGAAACCTAAATCTAGTT |
| | | ATAGACAAGGCAATCCTGAGCCAAGCCGAAGTAGTAATTAGT |
| | | AAGTTAACAAaacaaaaacaagctgacgctagtatgagtatagcttcacac |
| 254 | T50 L40 | gctgcgagccACGGACTTAAATAATTGAGCCTTAAAGAAGAAATTC |
| | | TTTAAGTGGATGCTCTCAAACTCAGGGAAACCTAAATCTAGTT |
| | | ATAGACAAGGCAATCCTGAGCCAAGCCGAAGTAGTAATTAGT |
| | | AAGTTAACAAaacaaaaacaagctgacgctagtatgagtatagcttcacactcaggtgagg |
| 255 | T50 L50 | gctgcgagccACGGACTTAAATAATTGAGCCTTAAAGAAGAAATTC |
| | | TTTAAGTGGATGCTCTCAAACTCAGGGAAACCTAAATCTAGTT |
| | | ATAGACAAGGCAATCCTGAGCCAAGCCGAAGTAGTAATTAGT |
| | | AAGTTAACAAaacaaaaacaagctgacgctagtatgagtatagcttcacactcaggtgaggc |
| | | atcattcgg |
| 256 | T75 L10 | gctgcgagccACGGACTTAAATAATTGAGCCTTAAAGAAGAAATTC |
| | | TTTAAGTGGATGCTCTCAAACTCAGGGAAACCTAAATCTAGTT |
| | | ATAGACAAGGCAATCCTGAGCCAAGCCGAAGTAGTAATTAGT |
| | | AAGTTAACAAaacaaaaacaagctcgcaccg |
| 257 | T75 L20 | gctgcgagccACGGACTTAAATAATTGAGCCTTAAAGAAGAAATTC |
| | | TTTAAGTGGATGCTCTCAAACTCAGGGAAACCTAAATCTAGTT |
| | | ATAGACAAGGCAATCCTGAGCCAAGCCGAAGTAGTAATTAGT |
| | | AAGTTAACAAaacaaaaacaagctcgcactgggtcggagcg |
| 258 | T25 L30 | gctgcgagccACGGACTTAAATAATTGAGCCTTAAAGAAGAAATTC |
| | 1 MM | TTTAAGTGGATGCTCTCAAACTCAGGGAAACCTAAATCTAGTT |
| | | ATAGACAAGGCAATCCTGAGCCAAGCCGAAGTAGTAATTAGT |
| | | AAGTTAACAAcacaaacacaagtcatatactgagtataagtataatttcag |
| 259 | T25 L30 | gctgcgagccACGGACTTAAATAATTGAGCCTTAAAGAAGAAATTC |
| | 3 MM | TTTAAGTGGATGCTCTCAAACTCAGGGAAACCTAAATCTAGTT |
| | | ATAGACAAGGCAATCCTGAGCCAAGCCGAAGTAGTAATTAGT |
| | | AAGTTAACAAcacaaacacaagtcatatactgagtataagtataatttcag |
| 260 | T25 L30 | gctgcgagccACGGACTTAAATAATTGAGCCTTAAAGAAGAAATTC |
| | 5 MM | TTTAAGTGGATGCTCTCAAACTCAGGGAAACCTAAATCTAGTT |
| | | ATAGACAAGGCAATCCTGAGCCAAGCCGAAGTAGTAATTAGT |
| | | AAGTTAACAAcacaaacacaagtcatatactgagtataagtataatttcag |
| 261 | T25 L30 | gctgcgagccACGGACTTAAATAATTGAGCCTTAAAGAAGAAATTC |
| | 8 MM | TTTAAGTGGATGCTCTCAAACTCAGGGAAACCTAAATCTAGTT |
| | | ATAGACAAGGCAATCCTGAGCCAAGCCGAAGTAGTAATTAGT |
| | | AAGTTAACAAcacaaacacaagtcatatactgagtataagtataatttcag |
| 262 | T25 L30 | gctgcgagccACGGACTTAAATAATTGAGCCTTAAAGAAGAAATTC |
| | OffTarget 10 | TTTAAGTGGATGCTCTCAAACTCAGGGAAACCTAAATCTAGTT |
| | | ATAGACAAGGCAATCCTGAGCCAAGCCGAAGTAGTAATTAGT |
| | | AAGTTAACAAcacaaacacaagtaacttagagagtataagtataatttcag |
| 263 | T25 L30 | gctgcgagccACGGACTTAAATAATTGAGCCTTAAAGAAGAAATTC |
| | OffTarget 20 | TTTAAGTGGATGCTCTCAAACTCAGGGAAACCTAAATCTAGTT |
| | | ATAGACAAGGCAATCCTGAGCCAAGCCGAAGTAGTAATTAGT |
| | | AAGTTAACAAcacaaacacaagtaacttagaTgtaacacacataatttcag |
| 264 | T25 L30 | gctgcgagccACGGACTTAAATAATTGAGCCTTAAAGAAGAAATTC |
| | OffTarget 30 | TTTAAGTGGATGCTCTCAAACTCAGGGAAACCTAAATCTAGTT |
| | | ATAGACAAGGCAATCCTGAGCCAAGCCGAAGTAGTAATTAGT |
| | | AAGTTAACAAcacaaacacaagtaacttagaTgtaacacacaccgatcaac |
| 265 | T25 L30 | ctgtttaatcACGGACTTAAATAATTGAGCCTTAAAGAAGAAATTCT |
| | I25-10 | TTAAGTGGATGCTCTCAAACTCAGGGAAACCTAAATCTAGTT |
| | | ATAGACAAGGCAATCCTGAGCCAAGCCGAAGTAGTAATTAGT |
| | | AAGTTAACAAcacaaacacaagtcatatactgagtataagtataatttcag |
| 266 | T25 L30 | cgtaatttatattgtgaatcACGGACTTAAATAATTGAGCCTTAAAGAAGA |
| | I25-20 | AATTCTTTAAGTGGATGCTCTCAAACTCAGGGAAACCTAAATC |
| | | TAGTTATAGACAAGGCAATCCTGAGCCAAGCCGAAGTAGTAA |
| | | TTAGTAAGTTAACAAcacaaacacaagtcatatactgagtataagtataatttcag |
| 267 | T25 L30 | gctatgatccACGGACTTAAATAATTGAGCCTTAAAGAAGAAATTC |
| | I50-00 | TTTAAGTGGATGCTCTCAAACTCAGGGAAACCTAAATCTAGTT |
| | | ATAGACAAGGCAATCCTGAGCCAAGCCGAAGTAGTAATTAGT |
| | | AAGTTAACAAcacaaacacaagtcatatactgagtataagtataatttcag |
| 268 | T25 L30 | cggatattatgctgcgatccACGGACTTAAATAATTGAGCCTTAAAGAAG |
| | I50-20 | AAATTCTTTAAGTGGATGCTCTCAAACTCAGGGAAACCTAAA |
| | | TCTAGTTATAGACAAGGCAATCCTGAGCCAAGCCGAAGTAGT |
| | | AATTAGTAAGTTAACAAcaeaaacacaagtcatatactgagtataagtataatttcag |
| 269 | T25 L30 | cggtaggcgctgctgcgagccACGGACTTAAATAATTGAGCCTTAAAGAA |
| | I80-00 | GAAATTCTTTAAGTGGATGCTCTCAAACTCAGGGAAACCTAA |
| | | ATCTAGTTATAGACAAGGCAATCCTGAGCCAAGCCGAAGTAG |
| | | TAATTAGTAAGTTAACAAcaeaaacacaagtcatatactgagtataagtataatttcag |
| 270 | T25 L30 | gcgctaacgtcgacgccggcaaacggtaggcgcgctgcgagccACGGACTTAAATAA |
| | I80-20x2 | TTGAGCCTTAAAGAAGAAATTCTTTAAGTGGATGCrCTCAAAC |
| | | TCAGGGAAACCTAAATCTAGTTATAGACAAGGCAATCCTGAG |
| | | CCAAGCCGAAGTAGTAATTAGTAAGTTAACAAcacaaacacaagtcat |
| | | atactgagtataagtataatttcag |
| 271 | T25 L30 | gcatgtcacttgtatcctcgaaacggatattatgctgcgatccACGGACTTAAATAATTG |
| | I50-20x2 | AGCCTTAAAGAAGAAATTCTTTAAGTGGATGCTCTCAAACTC |
| | | AGGGAAACCTAAATCTAGTTATAGACAAGGCAATCCTGAGCC |
| | | AAGCCGAAGTAGTAATTAGTAAGTTAACAAcacaaacacaagtcatatac |
| | | tgagtataagtataatttcag |
| 272 | T25 L30 | gttagagttatcatttatcgaaacgtaatttagattgtgaatcACGGACTTAAATAATTGA |
| | I25-20x2 | GCCTTAAAGAAGAAATTCTTTAAGTGGATGCTCTCAAACTCA |
| | | GGGAAACCTAAATCTAGTTATAGACAAGGCAATCCTGAGCCA |
| | | AGCCGAAGTAGTAATTAGTAAGTTAACAAcacaaacacaagtcatatactg |
| | | agtataagtataatttcag |
| 273 | T0 L0 | gctgcgagccACGGACTTAAATAATTGAGCCTTAAAGAAGAAATTC |
| | | TTTAAGTGGATGCTCTCAAACTCAGGGAAACCTAAATCTAGTT |
| | | ATAGACAAGGCAATCCTGAGCCAAGCCGAAGTAGTAATTAGT |
| | | AAGTTAACAAcacaaacacaa |
| 274 | T100 L5 | gctgcgagccACGGACTTAAATAATTGAGCCTTAAAGAAGAAATTC |
| | | TTTAAGTGGATGCTCTCAAACTCAGGGAAACCTAAATCTAGTT |
| | | ATAGACAAGGCAATCCTGAGCCAAGCCGAAGTAGTAATTAGT |
| | | AAGTTAACAAaacaaaaacaagcccg |
| 275 | T75 L30 | gctgcgagccACGGACTTAAATAATTGAGCCTTAAAGAAGAAATTC |
| | | TTTAAGTGGATGCTCTCAAACTCAGGGAAACCTAAATCTAGTT |
| | | ATAGACAAGGCAATCCTGAGCCAAGCCGAAGTAGTAATTAGT |
| | | AAGTTAACAAaacaaaaacaagctcgcactggccggaagctcgtcggagcg |
| 276 | T0 L0a | gctgcgagccACGGACTTAAATAATTGAGCCTTAAAGAAGAAATTC |
| | | TTTAAGTGGATGCTCTCAAACTCAGGGAAACCTAAATCTAGTT |
| | | ATAGACAAGGCAATCCTGAGCCAAGCCGAAGTAGTAATTAGT |
| | | AAGTTAACAATAGATGACTTACAACTAATCGGAAGGTGCAGA |
| | | GACTCGACGGGAGCTACCCTAACGTCAAGACGAGGGTAAAGA |
| | | GAGAGTCCAATTCTCAAAGCCAATAcacaaacacaa |
| 277 | T25 L10a | gctgcgagccACGGACTTAAATAATTGAGCCTTAAAGAAGAAATTC |
| | | TTTAAGTGGATGCTCTCAAACTCAGGGAAACCTAAATCTAGTT |
| | | ATAGACAAGGCAATCCTGAGCCAAGCCGAAGTAGTAATTAGT |
| | | AAGTTAACAATAGATGACTTACAACTAATCGGAAGGTGCAGA |
| | | GACTCGACGGGAGCTACCCTAACGTCAAGACGAGGGTAAAGA |
| | | GAGAGTCCAATTCTCAAAGCCAATAcacaaacacaacttatatact |
| 278 | T25 L20a | gctgcgagccACGGACTTAAATAATTGAGCCTTAAAGAAGAAATTC |
| | | TTTAAGTGGATGCTCTCAAACTCAGGGAAACCTAAATCTAGTT |
| | | ATAGACAAGGCAATCCTGAGCCAAGCCGAAGTAGTAATTAGT |
| | | AAGTTAACAATAGATGACTTACAACTAATCGGAAGGTGCAGA |
| | | GACTCGACGGGAGCTACCCTAACGTCAAGACGAGGGTAAAGA |
| | | GAGAGTCCAATTCTCAAAGCCAATAcacaaacacaagagtataagtataatttc |
| | | ag |
| 279 | T25 L30a | gctgcgagccACGGACTTAAATAATTGAGCCTTAAAGAAGAAATTC |
| | (I80-10) | TTTAAGTGGATGCTCTCAAACTCAGGGAAACCTAAATCTAGTT |
| | [Control] | ATAGACAAGGCAATCCTGAGCCAAGCCGAAGTAGTAATTAGT |
| | | AAGTTAACAATAGATGACTTACAACTAATCGGAAGGTGCAGA |
| | | GACTCGACGGGAGCTACCCTAACGTCAAGACGAGGGTAAAGA |
| | | GAGAGTCCAATTCTCAAAGCCAATAcacaaacacaagtcatatactgagtataa |
| | | gtataatttcag |
| 280 | T50 L10a | gctgcgagccACGGACTTAAATAATTGAGCCTTAAAGAAGAAATTC |
| | | TTTAAGTGGATGCTCTCAAACTCAGGGAAACCTAAATCTAGTT |
| | | ATAGACAAGGCAATCCTGAGCCAAGCCGAAGTAGTAATTAGT |
| | | AAGTTAACAATAGATGACTTACAACTAATCGGAAGGTGCAGA |
| | | GACTCGACGGGAGCTACCCTAACGTCAAGACGAGGGTAAAGA |
| | | GAGAGTCCAATTCTCAAAGCCAATAaacaaaaacaagctgacgcta |
| 281 | T50 L20a | gctgcgagccACGGACTTAAATAATTGAGCCTTAAAGAAGAAATTC |
| | | TTTAAGTGGATGCTCTCAAACTCAGGGAAACCTAAATCTAGTT |
| | | ATAGACAAGGCAATCCTGAGCCAAGCCGAAGTAGTAATTAGT |
| | | AAGTTAACAATAGATGACTTACAACTAATCGGAAGGTGCAGA |
| | | GACTCGACGGGAGCTACCCTAACGTCAAGACGAGGGTAAAGA |
| | | GAGAGTCCAATTCTCAAAGCCAATAaacaaaaacaagctgacgctagtatga |
| | | gtat |
| 282 | T50 L30a | gctgcgagccACGGACTTAAATAATTGAGCCTTAAAGAAGAAATTC |
| | | TTTAAGTGGATGCTCTCAAACTCAGGGAAACCTAAATCTAGTT |
| | | ATAGACAAGGCAATCCTGAGCCAAGCCGAAGTAGTAATTAGT |
| | | AAGTTAACAATAGATGACTTACAACTAATCGGAAGGTGCAGA |
| | | GACTCGACGGGAGCTACCCTAACGTCAAGACGAGGGTAAAGA |
| | | GAGAGTCCAATTCTCAAAGCCAATAaacaaaaacaagctgacgctagtatga |
| | | gtatagcttcacac |
| 283 | T75 L10a | gctgcgagccACGGACTTAAATAATTGAGCCTTAAAGAAGAAATTC |
| | | TTTAAGTGGATGCTCTCAAACTCAGGGAAACCTAAATCTAGTT |
| | | ATAGACAAGGCAATCCTGAGCCAAGCCGAAGTAGTAATTAGT |
| | | AAGTTAACAATAGATGACTTACAACTAATCGGAAGGTGCAGA |
| | | GACTCGACGGGAGCTACCCTAACGTCAAGACGAGGGTAAAGA |
| | | GAGAGTCCAATTCTCAAAGCCAATAaacaaaaacaagctcgcaccg |
| 284 | T75 L20a | gctgcgagccACGGACTTAAATAATTGAGCCTTAAAGAAGAAATTC |
| | | TTTAAGTGGATGCTCTCAAACTCAGGGAAACCTAAATCTAGTT |
| | | ATAGACAAGGCAATCCTGAGCCAAGCCGAAGTAGTAATTAGT |
| | | AAGTTAACAATAGATGACTTACAACTAATCGGAAGGTGCAGA |
| | | GACTCGACGGGAGCTACCCTAACGTCAAGACGAGGGTAAAGA |
| | | GAGAGTCCAATTCTCAAAGCCAATAaacaaaaacaagctcgcactgggtcgg |
| | | agcg |
| 285 | T75 L30a | gctgcgagccACGGACTTAAATAATTGAGCCTTAAAGAAGAAATTC |
| | | TTTAAGTGGATGCTCTCAAACTCAGGGAAACCTAAATCTAGTT |
| | | ATAGACAAGGCAATCCTGAGCCAAGCCGAAGTAGTAATTAGT |
| | | AAGTTAACAATAGATGACTTACAACTAATCGGAAGGTGCAGA |
| | | GACTCGACGGGAGCTACCCTAACGTCAAGACGAGGGTAAAGA |
| | | GAGAGTCCAATTCTCAAAGCCAATAaacaaaaacaagctcgcactggccgga |
| | | agctcgtcggagcg |
| 286 | T0 L0b | gctgcgagccACGGACTTAAATAATTGAGCCTTAAAGAAGAAATTC |
| | | TTTAAGTGGATGCTCTCAAACTCAGGGAAACCTAAATCTAGTT |
| | | ATAGACAAGGCAATCCTGAGCCAAGCCGAAGTAGTAATTAGT |
| | | AAGTTAACAATAGATGACTTACAACTAATCGGAAGGTGCAGA |
| | | GACTCGACGGGAGCTACCCTAACGTCcacaaacacaa |
| 287 | T25 L10b | gctgcgagccACGGACTTAAATAATTGAGCCTTAAAGAAGAAATTC |
| | | TTTAAGTGGATGCTCTCAAACTCAGGGAAACCTAAATCTAGTT |
| | | ATAGACAAGGCAATCCTGAGCCAAGCCGAAGTAGTAATTAGT |
| | | AAGTTAACAATAGATGACTTACAACTAATCGGAAGGTGCAGA |
| | | GACTCGACGGGAGCTACCCTAACGTCcacaaacacaacttatatact |
| 288 | T25 L20b | gctgcgagccACGGACTTAAATAATTGAGCCTTAAAGAAGAAATTC |
| | | TTTAAGTGGATGCTCTCAAACTCAGGGAAACCTAAATCTAGTT |
| | | ATAGACAAGGCAATCCTGAGCCAAGCCGAAGTAGTAATTAGT |
| | | AAGTTAACAATAGATGACTTACAACTAATCGGAAGGTGCAGA |
| | | GACTCGACGGGAGCTACCCTAACGTCcacaaacacaagagtataagtataatt |
| | | tcag |
| 289 | T25 L30b | gctgcgagccACGGACTTAAATAATTGAGCCTTAAAGAAGAAATTC |
| | (I80-10) | TTTAAGTGGATGCTCTCAAACTCAGGGAAACCTAAATCTAGTT |
| | [Control] | ATAGACAAGGCAATCCTGAGCCAAGCCGAAGTAGTAATTAGT |
| | | AAGTTAACAATAGATGACTTACAACTAATCGGAAGGTGCAGA |
| | | GACTCGACGGGAGCTACCCTAACGTCcacaaacacaagtcatatactgagtat |
| | | aagtataatttcag |
| 290 | T50 L10b | gctgcgagccACGGACTTAAATAATTGAGCCTTAAAGAAGAAATTC |
| | | TTTAAGTGGATGCTCTCAAACTCAGGGAAACCTAAATCTAGTT |
| | | ATAGACAAGGCAATCCTGAGCCAAGCCGAAGTAGTAATTAGT |
| | | AAGTTAACAATAGATGACTTACAACTAATCGGAAGGTGCAGA |
| | | GACTCGACGGGAGCTACCCTAACGTCaacaaaaacaagctgacgcta |
| 291 | T50 L20b | gctgcgagccACGGACTTAAATAATTGAGCCTTAAAGAAGAAATTC |
| | | TTTAAGTGGATGCTCTCAAACTCAGGGAAACCTAAATCTAGTT |
| | | ATAGACAAGGCAATCCTGAGCCAAGCCGAAGTAGTAATTAGT |
| | | AAGTTAACAATAGATGACTTACAACTAATCGGAAGGTGCAGA |
| | | GACTCGACGGGAGCTACCCTAACGTCaacaaaaacaagctgacgctagtatg |
| | | agtat |
| 292 | T50 L30b | gctgcgagccACGGACTTAAATAATTGAGCCTTAAAGAAGAAATTC |
| | | TTTAAGTGGATGCTCTCAAACTCAGGGAAACCTAAATCTAGTT |
| | | ATAGACAAGGCAATCCTGAGCCAAGCCGAAGTAGTAATTAGT |
| | | AAGTTAACAATAGATGACTTACAACTAATCGGAAGGTGCAGA |
| | | GACTCGACGGGAGCTACCCTAACGTCaacaaaaacaagctgacgctagtatg |
| | | agtatagcttcacac |
| 293 | T75 L10b | gctgcgagccACGGACTTAAATAATTGAGCCTTAAAGAAGAAATTC |
| | | TTTAAGTGGATGCTCTCAAACTCAGGGAAACCTAAATCTAGTT |
| | | ATAGACAAGGCAATCCTGAGCCAAGCCGAAGTAGTAATTAGT |
| | | AAGTTAACAATAGATGACTTACAACTAATCGGAAGGTGCAGA |
| | | GACTCGACGGGAGCTACCCTAACGTCaacaaaaacaagctcgcaccg |
| 294 | T75 L20b | gctgcgagccACGGACTTAAATAATTGAGCCTTAAAGAAGAAATTC |
| | | TTTAAGTGGATGCTCTCAAACTCAGGGAAACCTAAATCTAGTT |
| | | ATAGACAAGGCAATCCTGAGCCAAGCCGAAGTAGTAATTAGT |
| | | AAGTTAACAATAGATGACTTACAACTAATCGGAAGGTGCAGA |
| | | GACTCGACGGGAGCTACCCTAACGTCaacaaaaacaagctcgcactgggtcg |
| | | gagcg |
| 295 | T75 L30b | gctgcgagccACGGACTTAAATAATTGAGCCTTAAAGAAGAAATTC |
| | | TTTAAGTGGATGCTCTCAAACTCAGGGAAACCTAAATCTAGTT |
| | | ATAGACAAGGCAATCCTGAGCCAAGCCGAAGTAGTAATTAGT |
| | | AAGTTAACAATAGATGACTTACAACTAATCGGAAGGTGCAGA |
| | | GACTCGACGGGAGCTACCCTAACGTCaacaaaaacaagctcgcactggccg |
| | | gaagctcgtcggagcg |
| 296 | T25 L30 | ACGGACTTAAATAATTGAGCCTTAAAGAAGAAATTCTTTAAG |
| | I0-0 | TGGATGCTCTCAAACTCAGGGAAACCTAAATCTAGTTATAGA |
| | | CAAGGCAATCCTGAGCCAAGCCGAAGTAGTAATTAGTAAGTT |
| | | AACAAcacaaacacaagtcatatactgagtataagtataatttcag |
| 297 | T25 L30a | ACGGACTTAAATAATTGAGCCTTAAAGAAGAAATTCTTTAAG |
| | I0-0 | TGGATGCTCTCAAACTCAGGGAAACCTAAATCTAGTTATAGA |
| | | CAAGGCAATCCTGAGCCAAGCCGAAGTAGTAATTAGTAAGTT |
| | | AACAATAGATGACTTACAACTAATCGGAAGGTGCAGAGACTC |
| | | GACGGGAGCTACCCTAACGTCAAGACGAGGGTAAAGAGAGA |
| | | GTCCAATTCTCAAAGCCAATAcacaaacacaagtcatatactgagtataagtataat |
| | | ttcag |
| 298 | T25 L30 | ctgataatcACGGACTTAAATAATTGAGCCTTAAAGAAGAAATTCT |
| | I25-10a | TTAAGTGGATGCTCTCAAACTCAGGGAAACCTAAATCTAGTT |
| | | ATAGACAAGGCAATCCTGAGCCAAGCCGAAGTAGTAATTAGT |
| | | AAGTTAACAATAGATGACTTACAACTAATCGGAAGGTGCAGA |
| | | GACTCGACGGGAGCTACCCTAACGTCAAGACGAGGGTAAAGA |
| | | GAGAGTCCAATTCTCAAAGCCAATAcacaaacacaagtcatatactgagtataa |
| | | gtataatttcag |
| 299 | T25 L30 | cgtaatttatattgtgaatcACGGACTTAAATAATTGAGCCTTAAAGAAGA |
| | I25-20a | AATTCTTTAAGTGGATGCTCTCAAACTCAGGGAAACCTAAATC |
| | | TAGTTATAGACAAGGCAATCCTGAGCCAAGCCGAAGTAGTAA |
| | | TTAGTAAGTTAACAATAGATGACTTACAACTAATCGGAAGGT |
| | | GCAGAGACTCGACGGGAGCTACCCTAACGTCAAGACGAGGGT |
| | | AAAGAGAGAGTCCAATTCTCAAAGCCAATAcacaaacacaagtcatatac |
| | | tgagtataagtataatttcag |
| 300 | T25 L30 | gctatgatccACGGACTTAAATAATTGAGCCTTAAAGAAGAAATTC |
| | I50-10a | TTTAAGTGGATGCTCTCAAACTCAGGGAAACCTAAATCTAGTT |
| | | ATAGACAAGGCAATCCTGAGCCAAGCCGAAGTAGTAATTAGT |
| | | AAGTTAACAATAGATGACTTACAACTAATCGGAAGGTGCAGA |
| | | GACTCGACGGGAGCTACCCTAACGTCAAGACGAGGGTAAAGA |
| | | GAGAGTCCAATTCTCAAAGCCAATAcacaaacacaagtcatatactgagtataa |
| | | gtataatttcag |

[1274] In some embodiments, a spacer and 3′ intron fragment is a spacer and intron fragment having sequences as listed in Table 23.

TABLE 24
CAR sequences

| SEQ | | |
|---|---|---|
| ID NO | CAR | Sequence |
| 309 | FMC63-4- | ATGCTGCTGCTGGTCACATCTCTGCTGCTGTGCGAGCTGCCCC |
| | 1BB | ATCCTGCCTTTCTGCTGATCCCCGACATCCAGATGACCCAGAC |
| | | CACAAGCAGCCTGTCTGCCAGCCTGGGCGATAGAGTGACCAT |
| | | CAGCTGTAGAGCCAGCCAGGACATCAGCAAGTACCTGAACTG |
| | | GTATCAGCAAAAGCCCGACGGCACCGTGAAGCTGCTGATCTA |
| | | CCACACCAGCAGACTGCACAGCGGCGTGCCAAGCAGATTTTC |
| | | TGGCAGCGGCTCTGGCACCGACTACAGCCTGACAATCAGCAA |
| | | CCTGGAACAAGAGGATATCGCTACCTACTTCTGCCAGCAAGG |
| | | CAACACCCTGCCTTACACCTTTGGCGGAGGCACCAAGCTGGA |
| | | AATCACCGGCTCTACAAGCGGCAGCGGCAAACCTGGATCTGG |
| | | CGAGGGATCTACCAAGGGCGAAGTGAAACTGCAAGAGTCTG |
| | | GCCCTGGACTGGTGGCCCCATCTCAGTCTCTGAGCGTGACCTG |
| | | TACAGTCAGCGGAGTGTCCCTGCCTGATTACGGCGTGTCCTG |
| | | GATCAGACAGCCTCCTCGGAAAGGCCTGGAATGGCTGGGAGT |
| | | GATCTGGGGCAGCGAGACAACCTACTACAACAGCGCCCTGAA |
| | | GTCCCGGCTGACCATCATCAAGGACAACTCCAAGAGCCAGGT |
| | | GTTCCTGAAGATGAACAGCCTGCAGACCGACGACACCGCCAT |
| | | CTACTATTGCGCCAAGCACTACTACTACGGCGGCAGCTACGC |
| | | CATGGATTATTGGGGCCAGGGCACCAGCGTGACCGTTTCTTCT |
| | | GCCGCCGCTATCGAAGTGATGTACCCTCCTCCTTACCTGGACA |
| | | ACGAGAAGTCCAACGGCACCATCATCCACGTGAAGGGCAAG |
| | | CACCTGTGTCCTTCTCCACTGTTCCCCGGACCTAGCAAGCCTT |
| | | TCTGGGTGCTCGTTGTTGTTGGCGGCGTGCTGGCCTGTTACAG |
| | | CCTGCTGGTTACCGTGGCCTTCATCATCTTTTGGGTCAAGAGA |
| | | GGCCGGAAGAAACTTCTTTATATATTCAAGCAGCCCTTTATGC |
| | | GACCCGTTCAGACTACCCAAGAGGAAGATGGATGCAGTTGCC |
| | | GCTTTCCAGAAGAGGAGGAGGGCGGGTGCGAACTGtaa |
| 310 | FMC63-CD28 | ATGCTGCTGCTGGTCACATCTCTGCTGCTGTGCGAGCTGCCCC |
| | | ATCCTGCCTTTCTGCTGATCCCCGACATCCAGATGACCCAGAC |
| | | CACAAGCAGCCTGTCTGCCAGCCTGGGCGATAGAGTGACCAT |
| | | CAGCTGTAGAGCCAGCCAGGACATCAGCAAGTACCTGAACTG |
| | | GTATCAGCAAAAGCCCGACGGCACCGTGAAGCTGCTGATCTA |
| | | CCACACCAGCAGACTGCACAGCGGCGTGCCAAGCAGATTTTC |
| | | TGGCAGCGGCTCTGGCACCGACTACAGCCTGACAATCAGCAA |
| | | CCTGGAACAAGAGGATATCGCTACCTACTTCTGCCAGCAAGG |
| | | CAACACCCTGCCTTACACCTTTGGCGGAGGCACCAAGCTGGA |
| | | AATCACCGGCTCTACAAGCGGCAGCGGCAAACCTGGATCTGG |
| | | CGAGGGATCTACCAAGGGCGAAGTGAAACTGCAAGAGTCTG |
| | | GCCCTGGACTGGTGGCCCCATCTCAGTCTCTGAGCGTGACCTG |
| | | TACAGTCAGCGGAGTGTCCCTGCCTGATTACGGCGTGTCCTG |
| | | GATCAGACAGCCTCCTCGGAAAGGCCTGGAATGGCTGGGAGT |
| | | GATCTGGGGCAGCGAGACAACCTACTACAACAGCGCCCTGAA |
| | | GTCCCGGCTGACCATCATCAAGGACAACTCCAAGAGCCAGGT |
| | | GTTCCTGAAGATGAACAGCCTGCAGACCGACGACACCGCCAT |
| | | CTACTATTGCGCCAAGCACTACTACTACGGCGGCAGCTACGC |
| | | CATGGATTATTGGGGCCAGGGCACCAGCGTGACCGTTTCTTCT |
| | | GCCGCCGCTATCGAAGTGATGTACCCTCCTCCTTACCTGGACA |
| | | ACGAGAAGTCCAACGGCACCATCATCCACGTGAAGGGCAAG |
| | | CACCTGTGTCCTTCTCCACTGTTCCCCGGACCTAGCAAGCCTT |
| | | TCTGGGTGCTCGTTGTTGTTGGCGGCGTGCTGGCCTGTTACAG |
| | | CCTGCTGGTTACCGTGGCCTTCATCATCTTTTGGGTCCGAAGC |
| | | AAGCGGAGCCGGCTGCTGCACTCCGACTACATGAACATGACC |
| | | CCTAGACGGCCCGGACCAACCAGAAAGCACTACCAGCCTTAC |
| | | GCTCCTCCTAGAGACTTCGCCGCCTACCGGTCCtaa |
| 311 | FMC63- | ATGCTGCTGCTGGTCACATCTCTGCTGCTGTGCGAGCTGCCCC |
| | CD28-zeta | ATCCTGCCTTTCTGCTGATCCCCGACATCCAGATGACCCAGAC |
| | | CACAAGCAGCCTGTCTGCCAGCCTGGGCGATAGAGTGACCAT |
| | | CAGCTGTAGAGCCAGCCAGGACATCAGCAAGTACCTGAACTG |
| | | GTATCAGCAAAAGCCCGACGGCACCGTGAAGCTGCTGATCTA |
| | | CCACACCAGCAGACTGCACAGCGGCGTGCCAAGCAGATTTTC |
| | | TGGCAGCGGCTCTGGCACCGACTACAGCCTGACAATCAGCAA |
| | | CCTGGAACAAGAGGATATCGCTACCTACTTCTGCCAGCAAGG |
| | | CAACACCCTGCCTTACACCTTTGGCGGAGGCACCAAGCTGGA |
| | | AATCACCGGCTCTACAAGCGGCAGCGGCAAACCTGGATCTGG |
| | | CGAGGGATCTACCAAGGGCGAAGTGAAACTGCAAGAGTCTG |
| | | GCCCTGGACTGGTGGCCCCATCTCAGTCTCTGAGCGTGACCTG |
| | | TACAGTCAGCGGAGTGTCCCTGCCTGATTACGGCGTGTCCTG |
| | | GATCAGACAGCCTCCTCGGAAAGGCCTGGAATGGCTGGGAGT |
| | | GATCTGGGGCAGCGAGACAACCTACTACAACAGCGCCCTGAA |
| | | GTCCCGGCTGACCATCATCAAGGACAACTCCAAGAGCCAGGT |
| | | GTTCCTGAAGATGAACAGCCTGCAGACCGACGACACCGCCAT |
| | | CTACTATTGCGCCAAGCACTACTACTACGGCGGCAGCTACGC |
| | | CATGGATTATTGGGGCCAGGGCACCAGCGTGACCGTTTCTTCT |
| | | GCCGCCGCTATCGAAGTGATGTACCCTCCTCCTTACCTGGACA |
| | | ACGAGAAGTCCAACGGCACCATCATCCACGTGAAGGGCAAG |
| | | CACCTGTGTCCTTCTCCACTGTTCCCCGGACCTAGCAAGCCTT |
| | | TCTGGGTGCTCGTTGTTGTTGGCGGCGTGCTGGCCTGTTACAG |
| | | CCTGCTGGTTACCGTGGCCTTCATCATCTTTTGGGTCCGAAGC |
| | | AAGCGGAGCCGGCTGCTGCACTCCGACTACATGAACATGACC |
| | | CCTAGACGGCCCGGACCAACCAGAAAGCACTACCAGCCTTAC |
| | | GCTCCTCCTAGAGACTTCGCCGCCTACCGGTCCAGAGTGAAG |
| | | TTCAGCAGATCCGCCGATGCTCCCGCCTATCAGCAGGGCCAA |
| | | AACCAGCTGTACAACGAGCTGAACCTGGGGAGAAGAGAAGA |
| | | GTACGACGTGCTGGACAAGCGGAGAGGCAGAGATCCTGAAA |
| | | TGGGCGGCAAGCCCAGACGGAAGAATCCTCAAGAGGGCCTG |
| | | TATAATGAGCTGCAGAAAGACAAGATGGCCGAGGCCTACAG |
| | | CGAGATCGGAATGAAGGGCGAGCGCAGAAGAGGCAAGGGAC |
| | | ACGATGGACTGTACCAGGGACTGAGCACCGCCACCAAGGATA |
| | | CCTATGACGCCCTGCACATGCAGGCCCTGCCTCCAAGAtaa |
| 312 | FMC63-zeta | ATGCTGCTGCTGGTCACATCTCTGCTGCTGTGCGAGCTGCCCC |
| | | ATCCTGCCTTTCTGCTGATCCCCGACATCCAGATGACCCAGAC |
| | | CACAAGCAGCCTGTCTGCCAGCCTGGGCGATAGAGTGACCAT |
| | | CAGCTGTAGAGCCAGCCAGGACATCAGCAAGTACCTGAACTG |
| | | GTATCAGCAAAAGCCCGACGGCACCGTGAAGCTGCTGATCTA |
| | | CCACACCAGCAGACTGCACAGCGGCGTGCCAAGCAGATTTTC |
| | | TGGCAGCGGCTCTGGCACCGACTACAGCCTGACAATCAGCAA |
| | | CCTGGAACAAGAGGATATCGCTACCTACTTCTGCCAGCAAGG |
| | | CAACACCCTGCCTTACACCTTTGGCGGAGGCACCAAGCTGGA |
| | | AATCACCGGCTCTACAAGCGGCAGCGGCAAACCTGGATCTGG |
| | | CGAGGGATCTACCAAGGGCGAAGTGAAACTGCAAGAGTCTG |
| | | GCCCTGGACTGGTGGCCCCATCTCAGTCTCTGAGCGTGACCTG |
| | | TACAGTCAGCGGAGTGTCCCTGCCTGATTACGGCGTGTCCTG |
| | | GATCAGACAGCCTCCTCGGAAAGGCCTGGAATGGCTGGGAGT |
| | | GATCTGGGGCAGCGAGACAACCTACTACAACAGCGCCCTGAA |
| | | GTCCCGGCTGACCATCATCAAGGACAACTCCAAGAGCCAGGT |
| | | GTTCCTGAAGATGAACAGCCTGCAGACCGACGACACCGCCAT |
| | | CTACTATTGCGCCAAGCACTACTACTACGGCGGCAGCTACGC |
| | | CATGGATTATTGGGGCCAGGGCACCAGCGTGACCGTTTCTTCT |
| | | GCCGCCGCTATCGAAGTGATGTACCCTCCTCCTTACCTGGACA |
| | | ACGAGAAGTCCAACGGCACCATCATCCACGTGAAGGGCAAG |
| | | CACCTGTGTCCTTCTCCACTGTTCCCCGGACCTAGCAAGCCTT |
| | | TCTGGGTGCTCGTTGTTGTTGGCGGCGTGCTGGCCTGTTACAG |
| | | CCTGCTGGTTACCGTGGCCTTCATCATCTTTTGGGTCAGAGTG |
| | | AAGTTCAGCAGATCCGCCGATGCTCCCGCCTATCAGCAGGGC |
| | | CAAAACCAGCTGTACAACGAGCTGAACCTGGGGAGAAGAGA |
| | | AGAGTACGACGTGCTGGACAAGCGGAGAGGCAGAGATCCTG |
| | | AAATGGGCGGCAAGCCCAGACGGAAGAATCCTCAAGAGGGC |
| | | CTGTATAATGAGCTGCAGAAAGACAAGATGGCCGAGGCCTAC |
| | | AGCGAGATCGGAATGAAGGGCGAGCGCAGAAGAGGCAAGGG |
| | | ACACGATGGACTGTACCAGGGACTGAGCACCGCCACCAAGG |
| | | ATACCTATGACGCCCTGCACATGCAGGCCCTGCCTCCAAGAtaa |
| 313 | CircKymriah- | ATGGCTCTCCCGGTCACAGCCCTTCTCCTGCCCCTGGCACTCT |
| | Q388 | TGCTGCATGCGGCACGACCCGACATCCAGATGACCCAGACCA |
| | | CAAGCAGCCTGTCTGCCAGCCTGGGCGATAGAGTGACCATCA |
| | | GCTGTAGAGCCAGCCAGGACATCAGCAAGTACCTGAACTGGT |
| | | ATCAGCAAAAGCCCGACGGCACCGTGAAGCTGCTGATCTACC |
| | | ACACCAGCAGACTGCACAGCGGCGTGCCAAGCAGATTTTCTG |
| | | GCAGCGGCTCTGGCACCGACTACAGCCTGACAATCAGCAACC |
| | | TGGAACAAGAGGATATCGCTACCTACTTCTGCCAGCAAGGCA |
| | | ACACCCTGCCTTACACCTTTGGCGGAGGCACCAAGCTGGAAA |
| | | TCACCGGTGGAGGTGGTTCTGGCGGAGGGGGATCTGGTGGAG |
| | | GCGGTTCAGAAGTGAAACTGCAAGAGTCTGGCCCTGGACTGG |
| | | TGGCCCCATCTCAGTCTCTGAGCGTGACCTGTACAGTCAGCG |
| | | GAGTGTCCCTGCCTGATTACGGCGTGTCCTGGATCAGACAGC |
| | | CTCCTCGGAAAGGCCTGGAATGGCTGGGAGTGATCTGGGGCA |
| | | GCGAGACAACCTACTACAACAGCGCCCTGAAGTCCCGGCTGA |
| | | CCATCATCAAGGACAACTCCAAGAGCCAGGTGTTCCTGAAGA |
| | | TGAACAGCCTGCAGACCGACGACACCGCCATCTACTATTGCG |
| | | CCAAGCACTACTACTACGGCGGCAGCTACGCCATGGATTATT |
| | | GGGGCCAGGGCACCAGCGTGACCGTTTCTTCTACCACAACGC |
| | | CCGCCCCGCGACCGCCTACTCCCGCTCCCACAATTGCATCACA |
| | | ACCCCTGTCTTTGAGACCCGAAGCTTGTCGACCAGCTGCCGGT |
| | | GGCGCGGTTCACACGCGGGGGCTCGATTTCGCCTGTGATATA |
| | | TATATATGGGCCCCATTGGCTGGAACATGCGGAGTATTGCTTC |
| | | TGAGCCTGGTGATTACCCTCTACTGTAAGAGAGGCCGGAAGA |
| | | AACTTCTTTATATATTCAAGCAGCCCTTTATGCGACCCGTTCA |
| | | GACTACCCAAGAGGAAGATGGATGCAGTTGCCGCTTTCCAGA |
| | | AGAGGAGGAGGGCGGGTGCGAACTGAGAGTGAAGTTCAGCA |
| | | GATCCGCCGATGCTCCCGCCTATCAGCAGGGCCAAAACCAGC |
| | | TGTACAACGAGCTGAACCTGGGGAGAAGAGAAGAGTACGAC |
| | | GTGCTGGACAAGCGGAGAGGCAGAGATCCTGAAATGGGCGG |
| | | CAAGCCCAGACGGAAGAATCCTCAAGAGGGCCTGTATAATGA |
| | | GCTGCAGAAAGACAAGATGGCCGAGGCCTACAGCGAGATCG |
| | | GAATGAAGGGCGAGCGCAGAAGAGGCAAGGGACACGATGGA |
| | | CTGTACCAGGGACTGAGCACCGCCACCAAGGATACCTATGAC |
| | | GCCCTGCACATGCAGGCCCTGCCTCCAAGAtaa |
| 314 | CircKymriah- | ATGGCTCTCCCGGTCACAGCCCTTCTCCTGCCCCTGGCACTCT |
| | K388 | TGCTGCATGCGGCACGACCCGACATCCAGATGACCCAGACCA |
| | | CAAGCAGCCTGTCTGCCAGCCTGGGCGATAGAGTGACCATCA |
| | | GCTGTAGAGCCAGCCAGGACATCAGCAAGTACCTGAACTGGT |
| | | ATCAGCAAAAGCCCGACGGCACCGTGAAGCTGCTGATCTACC |
| | | ACACCAGCAGACTGCACAGCGGCGTGCCAAGCAGATTTTCTG |
| | | GCAGCGGCTCTGGCACCGACTACAGCCTGACAATCAGCAACC |
| | | TGGAACAAGAGGATATCGCTACCTACTTCTGCCAGCAAGGCA |
| | | ACACCCTGCCTTACACCTTTGGCGGAGGCACCAAGCTGGAAA |
| | | TCACCGGTGGAGGTGGTTCTGGCGGAGGGGGATCTGGTGGAG |
| | | GCGGTTCAGAAGTGAAACTGCAAGAGTCTGGCCCTGGACTGG |
| | | TGGCCCCATCTCAGTCTCTGAGCGTGACCTGTACAGTCAGCG |
| | | GAGTGTCCCTGCCTGATTACGGCGTGTCCTGGATCAGACAGC |
| | | CTCCTCGGAAAGGCCTGGAATGGCTGGGAGTGATCTGGGGCA |
| | | GCGAGACAACCTACTACAACAGCGCCCTGAAGTCCCGGCTGA |
| | | CCATCATCAAGGACAACTCCAAGAGCCAGGTGTTCCTGAAGA |
| | | TGAACAGCCTGCAGACCGACGACACCGCCATCTACTATTGCG |
| | | CCAAGCACTACTACTACGGCGGCAGCTACGCCATGGATTATT |
| | | GGGGCCAGGGCACCAGCGTGACCGTTTCTTCTACCACAACGC |
| | | CCGCCCCGCGACCGCCTACTCCCGCTCCCACAATTGCATCACA |
| | | ACCCCTGTCTTTGAGACCCGAAGCTTGTCGACCAGCTGCCGGT |
| | | GGCGCGGTTCACACGCGGGGGCTCGATTTCGCCTGTGATATA |
| | | TATATATGGGCCCCATTGGCTGGAACATGCGGAGTATTGCTTC |
| | | TGAGCCTGGTGATTACCCTCTACTGTAAGAGAGGCCGGAAGA |
| | | AACTTCTTTATATATTCAAGCAGCCCTTTATGCGACCCGTTCA |
| | | GACTACCCAAGAGGAAGATGGATGCAGTTGCCGCTTTCCAGA |
| | | AGAGGAGGAGGGCGGGTGCGAACTGAGAGTGAAGTTCAGCA |
| | | GATCCGCCGATGCTCCCGCCTATAAGCAGGGCCAAAACCAGC |
| | | TGTACAACGAGCTGAACCTGGGGAGAAGAGAAGAGTACGAC |
| | | GTGCTGGACAAGCGGAGAGGCAGAGATCCTGAAATGGGCGG |
| | | CAAGCCCAGACGGAAGAATCCTCAAGAGGGCCTGTATAATGA |
| | | GCTGCAGAAAGACAAGATGGCCGAGGCCTACAGCGAGATCG |
| | | GAATGAAGGGCGAGCGCAGAAGAGGCAAGGGACACGATGGA |
| | | CTGTACCAGGGACTGAGCACCGCCACCAAGGATACCTATGAC |
| | | GCCCTGCACATGCAGGCCCTGCCTCCAAGAtaa |
| 315 | CircM971- | ATGCTGCTGCTGGTCACATCTCTGCTGCTGTGCGAGCTGCCCC |
| | CD22 | ATCCTGCCTTTCTGCTGATCCCCCAGGTTCAACTCCAGCAGTC |
| | | TGGTCCCGGCCTCGTTAAACCAAGCCAGACTTTGTCTCTTACC |
| | | TGTGCTATCAGTGGCGATAGCGTGTCTAGTAATTCAGCCGCAT |
| | | GGAACTGGATCCGACAATCACCGAGTAGGGGACTTGAATGGC |
| | | TGGGTAGAACCTATTACCGGTCCAAATGGTACAATGACTATG |
| | | CAGTGTCTGTAAAAAGCAGGATCACGATCAACCCTGATACGT |
| | | CTAAAAACCAGTTTTCTCTGCAACTTAATAGTGTGACCCCTGA |
| | | AGACACCGCTGTGTATTACTGTGCACGGGAGGTTACCGGTGA |
| | | TCTTGAAGATGCTTTTGATATATGGGGCCAAGGTACGATGGT |
| | | CACGGTGTCTAGTgggggaggcggcagcGACATACAGATGACGCAG |
| | | AGCCCATCCAGTCTCTCCGCGTCTGTTGGTGACAGAGTGACTA |
| | | TTACATGTAGGGCGTCTCAGACCATTTGGTCTTACCTCAATTG |
| | | GTATCAACAGCGACCAGGCAAAGCACCGAACTTGCTCATTTA |
| | | CGCTGCCAGCTCACTCCAAAGTGGTGTGCCGTCCAGATTTAGT |
| | | GGTAGGGGCAGTGGCACTGATTTCACTCTGACTATTTCAAGTC |
| | | TTCAAGCTGAGGATTTTGCCACATACTACTGCCAGCAAAGTT |
| | | ACTCAATACCTCAGACTTTTGGACAGGGGACAAAATTGGAGA |
| | | TTAAAtccggaACCACAACGCCCGCCCCGCGACCGCCTACTCCC |
| | | GCTCCCACAATTGCATCACAACCCCTGTCTTTGAGACCCGAA |
| | | GCTTGTCGACCAGCTGCCGGTGGCGCGGTTCACACGCGGGGG |
| | | CTCGATTTCGCCTGTGATATATATATATGGGCCCCATTGGCTG |
| | | GAACATGCGGAGTATTGCTTCTGAGCCTGGTGATTACCCTCTA |
| | | CTGTAAGAGAGGCCGGAAGAAACTTCTTTATATATTCAAGCA |
| | | GCCCTTTATGCGACCCGTTCAGACTACCCAAGAGGAAGATGG |
| | | ATGCAGTTGCCGCTTTCCAGAAGAGGAGGAGGGCGGGTGCGA |
| | | ACTGAGAGTGAAGTTCAGCAGATCCGCCGATGCTCCCGCCTA |
| | | TAAGCAGGGCCAAAACCAGCTGTACAACGAGCTGAACCTGG |
| | | GGAGAAGAGAAGAGTACGACGTGCTGGACAAGCGGAGAGGC |
| | | AGAGATCCTGAAATGGGCGGCAAGCCCAGACGGAAGAATCC |
| | | TCAAGAGGGCCTGTATAATGAGCTGCAGAAAGACAAGATGG |
| | | CCGAGGCCTACAGCGAGATCGGAATGAAGGGCGAGCGCAGA |
| | | AGAGGCAAGGGACACGATGGACTGTACCAGGGACTGAGCAC |
| | | CGCCACCAAGGATACCTATGACGCCCTGCACATGCAGGCCCT |
| | | GCCTCCAAGAtaa |
| 316 | CircCD19_22 | ATGCTGCTGCTGGTCACATCTCTGCTGCTGTGCGAGCTGCCCC |
| | Bispecific 29 | ATCCTGCCTTTCTGCTGATCCCCGACATCCAGATGACCCAGAC |
| | | CACAAGCAGCCTGTCTGCCAGCCTGGGCGATAGAGTGACCAT |
| | | CAGCTGTAGAGCCAGCCAGGACATCAGCAAGTACCTGAACTG |
| | | GTATCAGCAAAAGCCCGACGGCACCGTGAAGCTGCTGATCTA |
| | | CCACACCAGCAGACTGCACAGCGGCGTGCCAAGCAGATTTTC |
| | | TGGCAGCGGCTCTGGCACCGACTACAGCCTGACAATCAGCAA |
| | | CCTGGAACAAGAGGATATCGCTACCTACTTCTGCCAGCAAGG |
| | | CAACACCCTGCCTTACACCTTTGGCGGAGGCACCAAGCTGGA |
| | | AATCACCggcggcggaggatccCAGGTTCAACTCCAGCAGTCTGGTC |
| | | CCGGCCTCGTTAAACCAAGCCAGACTTTGTCTCTTACCTGTGC |
| | | TATCAGTGGCGATAGCGTGTCTAGTAATTCAGCCGCATGGAA |
| | | CTGGATCCGACAATCACCGAGTAGGGGACTTGAATGGCTGGG |
| | | TAGAACCTATTACCGGTCCAAATGGTACAATGACTATGCAGT |
| | | GTCTGTAAAAAGCAGGATCACGATCAACCCTGATACGTCTAA |
| | | AAACCAGTTTTCTCTGCAACTTAATAGTGTGACCCCTGAAGAC |
| | | ACCGCTGTGTATTACTGTGCACGGGAGGTTACCGGTGATCTTG |
| | | AAGATGCTTTTGATATATGGGGCCAAGGTACGATGGTCACGG |
| | | TGTCTAGTGGCTCTACAAGCGGCAGCGGCAAACCTGGATCTG |
| | | GCGAGGGATCTACCAAGGGCGACATACAGATGACGCAGAGC |
| | | CCATCCAGTCTCTCCGCGTCTGTTGGTGACAGAGTGACTATTA |
| | | CATGTAGGGCGTCTCAGACCATTTGGTCTTACCTCAATTGGTA |
| | | TCAACAGCGACCAGGCAAAGCACCGAACTTGCTCATTTACGC |
| | | TGCCAGCTCACTCCAAAGTGGTGTGCCGTCCAGATTTAGTGGT |
| | | AGGGGCAGTGGCACTGATTTCACTCTGACTATTTCAAGTCTTC |
| | | AAGCTGAGGATTTTGCCACATACTACTGCCAGCAAAGTTACT |
| | | CAATACCTCAGACTTTTGGACAGGGGACAAAATTGGAGATTA |
| | | AAgggggaggcggcagcGAAGTGAAACTGCAAGAGTCTGGCCCTGG |
| | | ACTGGTGGCCCCATCTCAGTCTCTGAGCGTGACCTGTACAGTC |
| | | AGCGGAGTGTCCCTGCCTGATTACGGCGTGTCCTGGATCAGA |
| | | CAGCCTCCTCGGAAAGGCCTGGAATGGCTGGGAGTGATCTGG |
| | | GGCAGCGAGACAACCTACTACAACAGCGCCCTGAAGTCCCGG |
| | | CTGACCATCATCAAGGACAACTCCAAGAGCCAGGTGTTCCTG |
| | | AAGATGAACAGCCTGCAGACCGACGACACCGCCATCTACTAT |
| | | TGCGCCAAGCACTACTACTACGGCGGCAGCTACGCCATGGAT |
| | | TATTGGGGCCAGGGCACCAGCGTGACCGTTTCTTCTtccggaACC |
| | | ACAACGCCCGCCCCGCGACCGCCTACTCCCGCTCCCACAATT |
| | | GCATCACAACCCCTGTCTTTGAGACCCGAAGCTTGTCGACCA |
| | | GCTGCCGGTGGCGCGGTTCACACGCGGGGGCTCGATTTCGCC |
| | | TGTGATATATATATATGGGCCCCATTGGCTGGAACATGCGGA |
| | | GTATTGCTTCTGAGCCTGGTGATTACCCTCTACTGTAAGAGAG |
| | | GCCGGAAGAAACTTCTTTATATATTCAAGCAGCCCTTTATGCG |
| | | ACCCGTTCAGACTACCCAAGAGGAAGATGGATGCAGTTGCCG |
| | | CTTTCCAGAAGAGGAGGAGGGCGGGTGCGAACTGAGAGTGA |
| | | AGTTCAGCAGATCCGCCGATGCTCCCGCCTATAAGCAGGGCC |
| | | AAAACCAGCTGTACAACGAGCTGAACCTGGGGAGAAGAGAA |
| | | GAGTACGACGTGCTGGACAAGCGGAGAGGCAGAGATCCTGA |
| | | AATGGGCGGCAAGCCCAGACGGAAGAATCCTCAAGAGGGCC |
| | | TGTATAATGAGCTGCAGAAAGACAAGATGGCCGAGGCCTACA |
| | | GCGAGATCGGAATGAAGGGCGAGCGCAGAAGAGGCAAGGGA |
| | | CACGATGGACTGTACCAGGGACTGAGCACCGCCACCAAGGAT |
| | | ACCTATGACGCCCTGCACATGCAGGCCCTGCCTCCAAGAtaa |
| 317 | CircCD19_22 | ATGCTGCTGCTGGTCACATCTCTGCTGCTGTGCGAGCTGCCCC |
| | Bispecific 30 | ATCCTGCCTTTCTGCTGATCCCCCAGGTTCAACTCCAGCAGTC |
| | | TGGTCCCGGCCTCGTTAAACCAAGCCAGACTTTGTCTCTTACC |
| | | TGTGCTATCAGTGGCGATAGCGTGTCTAGTAATTCAGCCGCAT |
| | | GGAACTGGATCCGACAATCACCGAGTAGGGGACTTGAATGGC |
| | | TGGGTAGAACCTATTACCGGTCCAAATGGTACAATGACTATG |
| | | CAGTGTCTGTAAAAAGCAGGATCACGATCAACCCTGATACGT |
| | | CTAAAAACCAGTTTTCTCTGCAACTTAATAGTGTGACCCCTGA |
| | | AGACACCGCTGTGTATTACTGTGCACGGGAGGTTACCGGTGA |
| | | TCTTGAAGATGCTTTTGATATATGGGGCCAAGGTACGATGGT |
| | | CACGGTGTCTAGTgggggaggcggcagcGACATACAGATGACGCAG |
| | | AGCCCATCCAGTCTCTCCGCGTCTGTTGGTGACAGAGTGACTA |
| | | TTACATGTAGGGCGTCTCAGACCATTTGGTCTTACCTCAATTG |
| | | GTATCAACAGCGACCAGGCAAAGCACCGAACTTGCTCATTTA |
| | | CGCTGCCAGCTCACTCCAAAGTGGTGTGCCGTCCAGATTTAGT |
| | | GGTAGGGGCAGTGGCACTGATTTCACTCTGACTATTTCAAGTC |
| | | TTCAAGCTGAGGATTTTGCCACATACTACTGCCAGCAAAGTT |
| | | ACTCAATACCTCAGACTTTTGGACAGGGGACAAAATTGGAGA |
| | | TTAAAGGGGGAGGCGGATCCGGCGGTGGTGGCTCCGGCGGTG |
| | | GTGGTTCTGGAGGCGGCGGAAGCGGTGGGGGTGGTAGCGAC |
| | | ATCCAGATGACCCAGACCACAAGCAGCCTGTCTGCCAGCCTG |
| | | GGCGATAGAGTGACCATCAGCTGTAGAGCCAGCCAGGACATC |
| | | AGCAAGTACCTGAACTGGTATCAGCAAAAGCCCGACGGCACC |
| | | GTGAAGCTGCTGATCTACCACACCAGCAGACTGCACAGCGGC |
| | | GTGCCAAGCAGATTTTCTGGCAGCGGCTCTGGCACCGACTAC |
| | | AGCCTGACAATCAGCAACCTGGAACAAGAGGATATCGCTACC |
| | | TACTTCTGCCAGCAAGGCAACACCCTGCCTTACACCTTTGGCG |
| | | GAGGCACCAAGCTGGAAATCACCGGCTCTACAAGCGGCAGC |
| | | GGCAAACCTGGATCTGGCGAGGGATCTACCAAGGGCGAAGT |
| | | GAAACTGCAAGAGTCTGGCCCTGGACTGGTGGCCCCATCTCA |
| | | GTCTCTGAGCGTGACCTGTACAGTCAGCGGAGTGTCCCTGCCT |
| | | GATTACGGCGTGTCCTGGATCAGACAGCCTCCTCGGAAAGGC |
| | | CTGGAATGGCTGGGAGTGATCTGGGGCAGCGAGACAACCTAC |
| | | TACAACAGCGCCCTGAAGTCCCGGCTGACCATCATCAAGGAC |
| | | AACTCCAAGAGCCAGGTGTTCCTGAAGATGAACAGCCTGCAG |
| | | ACCGACGACACCGCCATCTACTATTGCGCCAAGCACTACTAC |
| | | TACGGCGGCAGCTACGCCATGGATTATTGGGGCCAGGGCACC |
| | | AGCGTGACCGTTTCTTCTtccggaACCACAACGCCCGCCCCGCGA |
| | | CCGCCTACTCCCGCTCCCACAATTGCATCACAACCCCTGTCTT |
| | | TGAGACCCGAAGCTTGTCGACCAGCTGCCGGTGGCGCGGTTC |
| | | ACACGCGGGGGCTCGATTTCGCCTGTGATATATATATATGGG |
| | | CCCCATTGGCTGGAACATGCGGAGTATTGCTTCTGAGCCTGGT |
| | | GATTACCCTCTACTGTAAGAGAGGCCGGAAGAAACTTCTTTA |
| | | TATATTCAAGCAGCCCTTTATGCGACCCGTTCAGACTACCCAA |
| | | GAGGAAGATGGATGCAGTTGCCGCTTTCCAGAAGAGGAGGA |
| | | GGGCGGGTGCGAACTGAGAGTGAAGTTCAGCAGATCCGCCG |
| | | ATGCTCCCGCCTATAAGCAGGGCCAAAACCAGCTGTACAACG |
| | | AGCTGAACCTGGGGAGAAGAGAAGAGTACGACGTGCTGGAC |
| | | AAGCGGAGAGGCAGAGATCCTGAAATGGGCGGCAAGCCCAG |
| | | ACGGAAGAATCCTCAAGAGGGCCTGTATAATGAGCTGCAGAA |
| | | AGACAAGATGGCCGAGGCCTACAGCGAGATCGGAATGAAGG |
| | | GCGAGCGCAGAAGAGGCAAGGGACACGATGGACTGTACCAG |
| | | GGACTGAGCACCGCCACCAAGGATACCTATGACGCCCTGCAC |
| | | ATGCAGGCCCTGCCTCCAAGAtaa |

[1275] In some embodiments, a CAR is encoded by a nucleotide sequence as listed in Table 24.

TABLE 25
CAR domain sequences.

| SEQ | | |
|---|---|---|
| ID NO | Protein | Sequence |
| 318 | 4-1BB | KRGRKKLLYIFKQPFMRPVQTTQEEDGCSCRFPEEEEGGCEL |
| 319 | CD3ζ | RVKFSRSADAPAYKQGQNQLYNELNLGRREEYDVLDKRRGRDPE |
| | intracellular | MGGKPRRKNPQEGLYNELQKDKMAEAYSEIGMKGERRRGKGHD |
| | domain | GLYQGLSTATKDTYDALHMQALPPR |
| 320 | CD28 | QVQLVQSGAEVEKPGASVKVSCKASGYTFTDYYMHWVRQAPGQ |
| | intracellular | GLEWMGWINPNSGGTNYAQKFQGRVTMTRDTSISTAYMELSRLR |
| | signaling | SDDTAVYYCASGWDFDYWGQGTLVTVSSGGGGSGGGGSGGGGS |
| | domain | GGGGSDIVMTQSPSSLSASVGDRVTITCRASQSIRYYLSWYQQKP |
| | | GKAPKLLIYTASILQNGVPSRFSGSGSGTDFTLTISSLQPEDFATYY |
| | | CLQTYTTPDFGPGTKVEIK |
| 321 | FMC63 VH | EVKLQESGPGLVAPSQSLSVTCTVSGVSLPDYGVSWIRQPPRKGLE |
| | | WLGVIWGSETTYYNSALKSRLTIIKDNSKSQVFLKMNSLQTDDTA |
| | | IYYCAKHYYYGGSYAMDYWGQGTSVTVSS |
| 322 | FMC63 VL | DIQMTQTTSSLSASLGDRVTISCRASQDISKYLNWYQQKPDGTVK |
| | | LLIYHTSRLHSGVPSRFSGSGSGTDYSLTISNLEQEDIATYFCQQGN |
| | | TLPYTFGGGTKLEIT |

[1276] In some embodiments, a CAR domain encoded by an inventive polynucleotide has a sequence as listed in Table 25.

TABLE 26
PD-1 or PD-L1 sequences.

| SEQ | | |
|---|---|---|
| ID NO | Description | Sequence |
| 323 | Pembrolizumab heavy | QVQLVQSGVEVKKPGASVKVSCKASGYTFTNYYMYWV |
| | chain | RQAPGQGLEWMGGINPSNGGTNFNEKFKNRVTLTTDSST |
| | | TTAYMELKSLQFDDTAVYYCARRDYRFDMGFDYWGQG |
| | | TTVTVSSASTKGPSVFPLAPCSRSTSESTAALGCLVKDYFP |
| | | EPVTVSWNSGALTSGVHTFPAVLQSSGLYSLSSVVTVPSS |
| | | SLGTKTYTCNVDHKPSNTKVDKRVESKYGPPCPPCPAPE |
| | | FLGGPSVFLFPPKPKDTLMISRTPEVTCVVVDVSQEDPEV |
| | | QFNWYVDGVEVHNAKTKPREEQFNSTYRVVSVLTVLHQ |
| | | DWLNGKEYKCKVSNKGLPSSIEKTISKAKGQPREPQVYT |
| | | LPPSQEEMTKNQVSLTCLVKGFYPSDIAVEWESNGQPEN |
| | | NYKTTPPVLDSDGSFFLYSRLTVDKSRWQEGNVFSCSVM |
| | | HEALHNHYTQKSLSLSLGK |
| 324 | Pembrolizumab light | EIVLTQSPATLSLSPGERATLSCRASKGVSTSGYSYLHWY |
| | chain | QQKPGQAPRLLIYLASYLESGVPARFSGSGSGTDFTLTISS |
| | | LEPEDFAVYYCQHSRDLPLTFGGGTKVEIKRTVAAPSVFI |
| | | FPPSDEQLKSGTASVVCLLNNFYPREAKVQWKVDNALQS |
| | | GNSQESVTEQDSKDSTYSLSSTLTLSKADYEKHKVYACE |
| | | VTHQGLSSPVTKSFNRGEC |
| 325 | Nivolumab heavy | QVQLVESGGGVVQPGRSLRLDCKASGITFSNSGMHWVR |
| | chain | QAPGKGLEWVAVIWYDGSKRYYADSVKGRFTISRDNSK |
| | | NTLFLQMNSLRAEDTAVYYCATNDDYWGQGTLVTVSSA |
| | | STKGPSVFPLAPCSRSTSESTAALGCLVKDYFPEPVTVSW |
| | | NSGALTSGVHTFPAVLQSSGLYSLSSVVTVPSSSLGTKTY |
| | | TCNVDHKPSNTKVDKRVESKYGPPCPPCPAPEFLGGPSVF |
| | | LFPPKPKDTLMISRTPEVTCVVVDVSQEDPEVQFNWYVD |
| | | GVEVHNAKTKPREEQFNSTYRVVSVLTVLHQDWLNGKE |
| | | YKCKVSNKGLPSSIEKTISKAKGQPREPQVYTLPPSQEEM |
| | | TKNQVSLTCLVKGFYPSDIAVEWESNGQPENNYKTTPPV |
| | | LDSDGSFFLYSRLTVDKSRWQEGNVFSCSVMHEALHNH |
| | | YTQKSLSLSLGK |
| 326 | Nivolumab light chain | EIVLTQSPATLSLSPGERATLSCRASQSVSSYLAWYQQKP |
| | | GQAPRLLIYDASNRATGIPARFSGSGSGTDFTLTISSLEPE |
| | | DFAVYYCQQSSNWPRTFGQGTKVEIKRTVAAPSVFIFPPS |
| | | DEQLKSGTASVVCLLNNFYPREAKVQWKVDNALQSGNS |
| | | QESVTEQDSKDSTYSLSSTLTLSKADYEKHKVYACEVTH |
| | | QGLSSPVTKSFNRGEC |
| 327 | Atezolizumab heavy | EVQLVESGGGLVQPGGSLRLSCAASGFTFSDSWIHWVRQ |
| | chain | APGKGLEWVAWISPYGGSTYYADSVKGRFTISADTSKNT |
| | | AYLQMNSLRAEDTAVYYCARRHWPGGFDYWGQGTLVT |
| | | VSSASTKGPSVFPLAPSSKSTSGGTAALGCLVKDYFPEPV |
| | | TVSWNSGALTSGVHTFPAVLQSSGLYSLSSVVTVPSSSLG |
| | | TQTYICNVNHKPSNTKVDKKVEPKSCDKTHTCPPCPAPE |
| | | LLGGPSVFLFPPKPKDTLMISRTPEVTCVVVDVSHEDPEV |
| | | KFNWYVDGVEVHNAKTKPREEQYASTYRVVSVLTVLHQ |
| | | DWLNGKEYKCKVSNKALPAPIEKTISKAKGQPREPQVYT |
| | | LPPSREEMTKNQVSLTCLVKGFYPSDIAVEWESNGQPEN |
| | | NYKTTPPVLDSDGSFFLYSKLTVDKSRWQQGNVFSCSVM |
| | | HEALHNHYTQKSLSLSPGK |
| 328 | Atezolizumab light | DIQMTQSPSSLSASVGDRVTITCRASQDVSTAVAWYQQK |
| | chain | PGKAPKLLIYSASFLYSGVPSRFSGSGSGTDFTLTISSLQPE |
| | | DFATYYCQQYLYHPATFGQGTKVEIKRTVAAPSVFIFPPS |
| | | DEQLKSGTASVVCLLNNFYPREAKVQWKVDNALQSGNS |
| | | QESVTEQDSKDSTYSLSSTLTLSKADYEKHKVYACEVTH |
| | | QGLSSPVTKSFNRGEC |
| 329 | Avelumab heavy chain | EVQLLESGGGLVQPGGSLRLSCAASGFTFSSYIMMWVRQ |
| | | APGKGLEWVSSIYPSGGITFYADTVKGRFTISRDNSKNTL |
| | | YLQMNSLRAEDTAVYYCARIKLGTVTTVDYWGQGTLVT |
| | | VSSASTKGPSVFPLAPSSKSTSGGTAALGCLVKDYFPEPV |
| | | TVSWNSGALTSGVHTFPAVLQSSGLYSLSSVVTVPSSSLG |
| | | TQTYICNVNHKPSNTKVDKKVEPKSCDKTHTCPPCPAPE |
| | | LLGGPSVFLFPPKPKDTLMISRTPEVTCVVVDVSHEDPEV |
| | | KFNWYVDGVEVHNAKTKPREEQYNSTYRVVSVLTVLHQ |
| | | DWLNGKEYKCKVSNKALPAPIEKTISKAKGQPREPQVYT |
| | | LPPSRDELTKNQVSLTCLVKGFYPSDIAVEWESNGQPENN |

[1277] In some embodiments, a cleavage site separating expression sequences encoded by an inventive polynucleotide has a sequence listed in Table 26.

TABLE 27
Cytokine sequences.

| SEQ | | |
|---|---|---|
| ID NO | Cytokine | Sequence |
| 333 | IL-2 | APTSSSTKKTQLQLEHLLLDLQMILNGINNYKNPKLTRMLTFKFY |
| | | MPKKATELKHLQCLEEELKPLEEVLNLAQSKNFHLRPRDLISNINV |
| | | IVLELKGSETTFMCEYADETATIVEFLNRWITFCQSIISTLT |
| 334 | IL-12A | RNLPVATPDPGMFPCLHHSQNLLRAVSNMLQKARQTLEFYPCTSE |
| | | EIDHEDITKDKTSTVEACLPLELTKNESCLNSRETSFITNGSCLASR |
| | | KTSFMMALCLSSIYEDLKMYQVEFKTMNAKLLMDPKRQIFLDQN |
| | | MLAVIDELMQALNFNSETVPQKSSLEEPDFYKTKIKLCILLHAFRIR |
| | | AVTIDRVMSYLNAS |
| 335 | IL-12B | IWELKKDVYVVELDWYPDAPGEMVVLTCDTPEEDGITWTLDQSS |
| | | EVLGSGKTLTIQVKEFGDAGQYTCHKGGEVLSHSLLLLHKKEDGI |
| | | WSTDILKDQKEPKNKTFLRCEAKNYSGRFTCWWLTTISTDLTFSV |
| | | KSSRGSSDPQGVTCGAATLSAERVRGDNKEYEYSVECQEDSACPA |
| | | AEESLPIEVMVDAVHKLKYENYTSSFFIRDIIKPDPPKNLQLKPLKN |
| | | SRQVEVSWEYPDTWSTPHSYFSLTFCVQVQGKSKREKKDRVFTD |
| | | KTSATVICRKNASISVRAQDRYYSSSWSEWASVPCS |
| 336 | IL-7 | DCDIEGKDGKQYESVLMVSIDQLLDSMKEIGSNCLNNEFNFFKRIa |
| | | CDANKEGMFLFRAARKLRQFLKMNSTGDFDLHLLKVSEGTTIITN |
| | | CTGQVKGRKPAALGEAQPTKSLEENKSLKEQKKLNDLCFLKRLL |
| | | QEIKTCWNKILMGTKEH |
| 337 | IL-10 | SPGQGTQSENSCTHFPGNLPNMLRDLRDAFSRVKTFFQMKDQLD |
| | | NLLLKESLLEDFKGYLGCQALSEMIQFYLFFVMPQAENQDPDIKA |
| | | HVNSLGENLKTLRLRLRRCHRFLPCENKSKAVEQVKNAFNKLQE |
| | | KGIYKAMSEFDIFINYIEAYMTMKIRN |
| 338 | IL-15 | NWVNVISDLKKIEDLIQSMHIDATLYTESDVHPSCKVTAMKCFLL |
| | | ELQVISLESGDASIHDTVENLIILANNSLSSNGNVTESGCKECEELE |
| | | EKNIKEFLQSFVHIVQMFINTS |
| 339 | IL-18 | YFGKLESKLSVIRNLNDQVLFIDQGNRPLFEDMTDSDCRDNAPRTI |
| | | FIISMYKDSQPRGMAVTISVKCEKISTLSCENKIISFKEMNPPDNIKD |
| | | TKSDIIFFQRSVPGHDNKMQFESSSYEGYFLACEKERDLFKLILKK |
| | | EDELGDRSIMFTVQNED |
| 340 | IL-27beta | RKGPPAALTLPRVQCRASRYPIAVDCSWTLPPAPNSTSPVSFIATY |
| | | RLGMAARGHSWPCLQQTPTSTSCTITDVQLFSMAPYVLNVTAVH |
| | | PWGSSSSFVPFITEHIIKPDPPEGVRLSPLAERQLQVQWEPPGSWPF |
| | | PEIFSLKYWIRYKRQGAARFHRVGPIEATSFILRAVRPRARYYVQV |
| | | AAQDLTDYGELSDWSLPATATMSLGK |
| 341 | IFNgamma | QDPYVKEAENLKKYFNAGHSDVADNGTLFLGILKNWKEESDRKI |
| | | MQSQIVSFYFKLFKNFKDDQSIQKSVETIKEDMNVKFFNSNKKKR |
| | | DDFEKLTNYSVTDLNVQRKAIHELIQVMAELSPAAKTGKRKRSQ |
| | | MLFRG |
| 342 | TGFbeta1 | ALDTNYCFSSTEKNCCVRQLYIDFRKDLGWKWIHEPKGYHANFC |
| | | LGPCPYIWSLDTQYSKVLALYNQHNPGASAAPCCVPQALEPLPIV |
| | | YYVGRKPKVEQLSNMIVRSCKCS |

[1278] In some embodiments, a cytokine encoded by an inventive polynucleotide has a sequence as listed in Table 27.

TABLE 28
Transcription factor sequences.

| SEQ | Transcription | |
|---|---|---|
| ID NO | factor | Sequence |
| 343 | FOXP3 | MPNPRPGKPSAPSLALGPSPGASPSWRAAPKASDLLGARGPGGT |
| | | FQGRDLRGGAHASSSSLNPMPPSQLQLPTLPLVMVAPSGARLGP |
| | | LPHLQALLQDRPHFMHQLSTVDAHARTPVLQVHPLESPAMISLT |
| | | PPTTATGVFSLKARPGLPPGINVASLEWVSREPALLCTFPNPSAPR |
| | | KDSTLSAVPQSSYPLLANGVCKWPGCEKVFEEPEDFLKHCQADH |
| | | LLDEKGRAQCLLQREMVQSLEQQLVLEKEKLSAMQAHLAGKM |
| | | ALTKASSVASSDKGSCCIVAAGSQGPVVPAWSGPREAPDSLFAV |
| | | RRHLWGSHGNSTFPEFLHNMDYFKFHNMRPPFTYATLIRWAILE |
| | | APEKQRTLNEIYHWFTRMFAFFRNHPATWKNAIRHNLSLHKCFV |
| | | RVESEKGAVWTVDELEFRKKRSQRPSRCSNPTPGP |
| 344 | FOXP3 | MPNPRPGKPSAPSLALGPSPGASPSWRAAPKASDLLGARGPGGT |
| | | FQGRDLRGGAHASSSSLNPMPPSQLQLPTLPLVMVAPSGARLGP |
| | | LPHLQALLQDRPHFMHQLSTVDAHARTPVLQVHPLESPAMISLT |
| | | PPTTATGVFSLKARPGLPPGINVASLEWVSREPALLCTFPNPSAPR |
| | | KDSTLSAVPQSSYPLLANGVCKWPGCEKVFEEPEDFLKHCQADH |
| | | LLDEKGRAQCLLQREMVQSLEQQLVLEKEKLSAMQAHLAGKM |
| | | ALTKASSVASSDKGSCCIVAAGSQGPVVPAWSGPREAPDSLFAV |
| | | RRHLWGSHGNSTFPEFLHNMDYFKFHNMRPPFTYATLIRWAILE |
| | | APEKQRTLNEIYHWFTRMFAFFRNHPATWKNAIRHNLSLHKCFV |
| | | RVESEKGAVWTVDELEFRKKR |
| 345 | FOXP3 | GGAHASSSSLNPMPPSQLQLPTLPLVMVAPSGARLGPLPHLQAL |
| | | LQDRPHFMHQLSTVDAHARTPVLQVHPLESPAMISLTPPTTATG |
| | | VFSLKARPGLPPGINVASLEWVSREPALLCTFPNPSAPRKDSTLS |
| | | AVPQSSYPLLANGVCKWPGCEKVFEEPEDFLKHCQADHLLDEK |
| | | GRAQCLLQREMVQSLEQQLVLEKEKLSAMQAHLAGKMALTKA |
| | | SSVASSDKGSCCIVAAGSQGPVVPAWSGPREAPDSLFAVRRHLW |
| | | GSHGNSTFPEFLHNMDYFKFHNMRPPFTYATLIRWAILEAPEKQ |
| | | RTLNEIYHWFTRMFAFFRNHPATWKNAIRHNLSLHKCFVRVESE |
| | | KGAVWTVDELEFRKKR |
| 346 | STAT5B | MAVWIQAQQLQGEALHQMQALYGQHFPIEVRHYLSQWIESQA |
| | | WDSVDLDNPQENIKATQLLEGLVQELQKKAEHQVGEDGFLLKI |
| | | KLGHYATQLQNTYDRCPMELVRCIRHILYNEQRLVREANNGSSP |
| | | AGSLADAMSQKHLQINQTFEELRLVTQDTENELKKLQQTQEYFTI |
| | | QYQESLRIQAQFGPLAQLSPQERLSRETALQQKQVSLEAWLQRE |
| | | AQTLQQYRVELAEKHQKTLQLLRKQQTIILDDELIQWKRRQQLA |
| | | GNGGPPEGSLDVLQSWCEKLAEIIWQNRQQIRRAEHLCQQLPIPG |
| | | PVEEMLAEVNATITDIISALVTSTFIIEKQPPQVLKTQTKFAATVR |
| | | LLVGGKLNVHMNPPQVKATIISEQQAKSLLKNENTRNDYSGEIL |
| | | NNCCVMEYHQATGTLSAHFRNMSLKRIKRSDRRGAESVTEEKF |
| | | TILFESQFSVGGNELVFQVKTLSLPVVVIVHGSQDNNATATVLW |
| | | DNAFAEPGRVPFAVPDKVLWPQLCEALNMKFKAEVQSNRGLTK |
| | | ENLVFLAQKLFNNSSSHLEDYSGLSVSWSQFNRENLPGRNYTFW |
| | | QWFDGVMEVLKKHLKPHWNDGAILGFVNKQQAHDLLINKPDG |
| | | TFLLRFSDSEIGGITIAWKFDSQERMFWNLMPFTTRDFSIRSLADR |
| | | LGDLNYLIYVFPDRPKDEVYSKYYTPVPCESATAKAVDGYVKPQ |
| | | IKQVVPEFVNASADAGGGSATYMDQAPSPAVCPQAHYNMYPQ |
| | | NPDSVLDTDGDFDLEDTMDVARRVEELLGRPMDSQWIPHAQS |
| 347 | HELIOS | METEAIDGYITCDNELSPEREHSNMAIDLTSSTPNGQHASPSHMT |
| | | STNSVKLEMQSDEECDRKPLSREDEIRGHDEGSSLEEPLIESSEVA |
| | | DNRKVQELQGEGGIRLPNGKLKCDVCGMVCIGPNVLMVHKRSH |
| | | TGERPFHCNQCGASFTQKGNLLRHIKLHSGEKPFKCPFCSYACRR |
| | | RDALTGHLRTHSVGKPHKCNYCGRSYKQRSSLEEHKERCHNYL |
| | | QNVSMEAAGQVMSHHVPPMEDCKEQEPIMDNNISLVPFERPAVI |
| | | EKLTGNMGKRKSSTPQKFVGEKLMRFSYPDIHFDMNLTYEKEA |
| | | ELMQSHMMDQAINNAITYLGAEALHPLMQHPPSTIAEVAPVISS |
| | | AYSQVYHPNRIERPISRETADSHENNMDGPISLIRPKSRPQEREAS |
| | | PSNSCLDSTDSESSHDDHQSYQGHPALNPKRKQSPAYMKEDVK |
| | | ALDTTKAPKGSLKDIYKVFNGEGEQIRAFKCEHCRVLFLDHVMY |
| | | TIHMGCHGYRDPLECNICGYRSODRYEFSSHIVRGEHTFH |

[1279] In some embodiments, a transcription factor encoded by an inventive polynucleotide has a sequence as listed in Table 28.

TABLE 29
Additional Accessory Sequences

| SEQ | | |
|---|---|---|
| ID NO | IRES | Sequence |
| 390 | CK 3′ UTR Scr | ccctgcagccgtcaccgtaagtttgaagttaccgcatatcagcctctgcttcccagcgcgtccaatt |
| | | cctgttcttattgtttcccctccaggcgttacgcgtgacgacgaactgtgtcgcagctaccacattatt |
| | | ccggagccttcattctcgcggctctgatcgt |
| 391 | CK 3′ UTR S2M | ggagaccgcggccacgccgagtaggatcgagggtacagtctcc |
| 392 | CK 3′ UTR | gacaccaggatcactcttgctctgacccgccctgtgtagaatagactcatgcttccctaagacctgg |
| | | atttcttcccaggcactttcacccgcctgccctgctccttcagtggactgcacccagggaggcggtc |
| | | tctgactgtcctttactttctattctggattgc |
| 393 | CK 5′ UTR 1 | AAACCCCCCTAAGCCGCCGCCGCCGCCACC |
| 394 | CK 5′ UTR 2 | CCCCCCCAACCCGTCACG |
| 395 | CK 5′ UTR 3 | GTCACG |
| 396 | SZ1 3′ UTR Scr | tctgcgcactcgtaatcagtactaacccccctttgtcggacactatgcgataatcgatccgcctttttc |
| | | accgccttcggaattttatttacctcaactgatcctggagtctctcttggttttcacggaggcctccgcc |
| | | ca |
| 397 | SZ1 S2M | ggagaccgcggccacgccgagtaggatcgagggtacagtctcc |
| 398 | SZ1 3′ UTR | ccccttgaaacccccgccccaggttcagtctctcttcatccctctgtcctgcatggtgatacaaagac |
| | | cctttgtggaccctaagccatgtagttgctgctccctccttccagttgtgaatattggtttctgttaatca |
| | | ca |
| 399 | SZ1 5′ UTR 1 | AAACCCCCCTAAGCCGCCGCCGCCGCCACC |
| 400 | SZ1 5′ UTR 2 | CCCCCCCAACCCGTCACG |
| 401 | SZ1 5′ UTR 3 | GTCACG |
| 402 | UTR1 | gTcacG |
| 403 | UTR2 | AATAAGAGAGAAAAGAAGAGTAAGAAGAAATATAAGAGC |
| | | CACC |
| 404 | UTR3 | cgaactagtattcttctggtccccacagactcagagagaacccgccacc |
| 405 | UTR4 | Agccacc |
| 406 | STOP1 | tgatAGctAaCtaG |
| 407 | STOP2 | tagtAGctAaCtaG |
| 408 | STOP3 | tGatGActGaGtGA |
| 409 | STOP4 | tagtagctagGtag |
| 410 | STOP5 | taa |
| 411 | STOP6 | taatagCtaaCtag |
| 412 | STOP7 | taaCtagCtaaCtag |

[1280] In some embodiments, a circular RNA or a precursor RNA (e.g., linear precursor RNA) disclosed herein comprises a sequence as listed in Table 29.

[1281] In some embodiments, a polynucleotide or a protein encoded by a polynucleotide contains a sequence with at least about 70%, 75%, 80%, 85%, 90%, 91%, 92%, 93%, 94%, 95%, 96%, 97%, 98%, 99%, or 99.5% similarity to one or more sequences disclosed herein. In some embodiments, a polynucleotide or a protein encoded by a polynucleotide contains a sequence that is identical to one or more sequences disclosed herein.

[1282] Preferred embodiments are described herein. Variations of those preferred embodiments may become apparent to those of ordinary skill in the art upon reading the foregoing description. The inventors expect skilled artisans to employ such variations as appropriate, and the inventors intend for the invention to be practiced otherwise than as specifically described herein. Accordingly, this invention includes all modifications and equivalents of the subject matter recited in the claims appended hereto as permitted by applicable law. Moreover, any combination of the above-described elements in all possible variations thereof is encompassed by the invention unless otherwise indicated herein or otherwise clearly contradicted by context.

### EXAMPLES

[1283] Wesselhoeft et al. (2019) RNA Circularization Diminishes Immunogenicity and Can Extend Translation Duration In Vivo. Molecular Cell. 74(3), 508-520 and Wesselhoeft et al. (2018) Engineering circular RNA for Potent and Stable Translation in Eukaryotic Cells. Nature Communications. 9, 2629 are incorporated by reference in their entirety.

[1284] The invention is further described in detail by reference to the following examples but are not intended to be limited to the following examples. These examples encompass any and all variations of the illustrations with the intention of providing those of ordinary skill in the art with complete disclosure and description of how to make and use the subject invention and are not intended to limit the scope of what is regarded as the invention.

### Example 1

### Example 1A: External Homology Regions Allow for Circularization of Long Precursor RNA Using the Permuted Intron Exon (PIE) Circularization Strategy

[1285] A 1,100 nt sequence containing a full-length encephalomyocarditis virus (EMCV) IRES, a Gaussia luciferase (GLuc) expression sequence, and two short exon fragments of the permuted intron-exon (PIE) construct were inserted between the 3′ and 5′ introns of the permuted group I catalytic intron in the thymidylate synthase (Td) gene of the T4 phage. Precursor RNA was synthesized by run-off transcription. Circularization was attempted by heating the precursor RNA in the presence of magnesium ions and GTP, but splicing products were not obtained.

[1286] Perfectly complementary 9 nucleotide and 19 nucleotide long homology regions were designed and added at the 5′ and 3′ ends of the precursor RNA. Addition of these homology arms increased splicing efficiency from 0 to 16% for 9 nucleotide homology regions and to 48% for 19 nucleotide homology regions as assessed by disappearance of the precursor RNA band.

[1287] The splicing product was treated with RNase R. Sequencing across the putative splice junction of RNase R-treated splicing reactions revealed ligated exons, and digestion of the RNase R-treated splicing reaction with oligonucleotide-targeted RNase H produced a single band in contrast to two bands yielded by RNase H-digested linear precursor. This shows that circular RNA is a major product of the splicing reactions of precursor RNA containing the 9 or 19 nucleotide long external homology regions.

### Example 1B: Spacers that Conserve Secondary Structures of IRES and PIE Splice Sites Increase Circularization Efficiency

[1288] A series of spacers was designed and inserted between the 3′ PIE splice site and the IRES. These spacers were designed to either conserve or disrupt secondary structures within intron sequences in the IRES, 3′ PIE splice site, and/or 5′ splice site. The addition of spacer sequences designed to conserve secondary structures resulted in 87% splicing efficiency, while the addition of a disruptive spacer sequences resulted in no detectable splicing.

### Example 2

### Example 2A: Internal Homology Regions in Addition to External Homology Regions Creates a Splicing Bubble and Allows for Translation of Several Expression Sequences

[1289] Spacers were designed to be unstructured, non-homologous to the intron and IRES sequences, and to contain spacer-spacer homology regions. These were inserted between the 5′ exon and IRES and between the 3′ exon and expression sequence in constructs containing external homology regions, EMCV IRES, and expression sequences for Gaussia luciferase (total length: 1289 nt), Firefly luciferase (2384 nt), eGFP (1451 nt), human erythropoietin (1313 nt), and Cas9 endonuclease (4934 nt). Circularization of all 5 constructs was achieved. Circularization of constructs utilizing T4 phage and Anabaena introns were roughly equal. Circularization efficiency was higher for shorter sequences. To measure translation, each construct was transfected into HEK293 cells. Gaussia and Firefly luciferase transfected cells produced a robust response as measured by luminescence, human erythropoietin was detectable in the media of cells transfected with erythropoietin circRNA, and EGFP fluorescence was observed from cells transfected with EGFP circRNA. Co-transfection of Cas9 circRNA with sgRNA directed against GFP into cells constitutively expressing GFP resulted in ablated fluorescence in up to 97% of cells in comparison to an sgRNA-only control.

### Example 2B: Use of CVB3 IRES Increases Protein Production

[1290] Constructs with internal and external homology regions and differing IRES containing either Gaussia luciferase or Firefly luciferase expression sequences were made. Protein production was measured by luminescence in the supernatant of HEK293 cells 24 hours after transfection. The Coxsackievirus B3 (CVB3) IRES construct produced the most protein in both cases.

### Example 2C: Use of polyA or polyAC Spacers Increases Protein Production

[1291] Thirty nucleotide long polyA or polyAC spacers were added between the IRES and splice junction in a construct with each IRES that produced protein in example 2B. Gaussia luciferase activity was measured by luminescence in the supernatant of HEK293 cells 24 hours after transfection. Both spacers improved expression in every construct over control constructs without spacers.

### Example 3

### HEK293 or HeLa Cells Transfected with Circular RNA Produce More Protein than Those Transfected with Comparable Unmodified or Modified Linear RNA

[1292] HPLC-purified Gaussia luciferase-coding circRNA (CVB3-GLuc-pAC) was compared with a canonical unmodified 5′ methylguanosine-capped and 3′ polyA-tailed linear GLuc mRNA, and a commercially available nucleoside-modified (pseudouridine, 5-methylcytosine) linear GLuc mRNA (from Trilink). Luminescence was measured 24 h post-transfection, revealing that circRNA produced 811.2% more protein than the unmodified linear mRNA in HEK293 cells and 54.5% more protein than the modified mRNA Similar results were obtained in HeLa cells and a comparison of optimized circRNA coding for human erythropoietin with linear mRNA modified with 5-methoxyuridine.

[1293] Luminescence data was collected over 6 days. In HEK293 cells, circRNA transfection resulted in a protein production half-life of 80 hours, in comparison with the 43 hours of unmodified linear mRNA and 45 hours of modified linear mRNA. In HeLa cells, circRNA transfection resulted in a protein production half-life of 116 hours, in comparison with the 44 hours of unmodified linear mRNA and 49 hours of modified linear mRNA. CircRNA produced substantially more protein than both the unmodified and modified linear mRNAs over its lifetime in both cell types.

### Example 4

### Example 4A: Purification of circRNA by RNase Digestion, HPLC Purification, and Phosphatase Treatment Decreases Immunogenicity. Completely Purified Circular RNA is Significantly Less Immunogenic than Unpurified or Partially Purified Circular RNA. Protein Expression Stability and Cell Viability are Dependent on Cell Type and Circular RNA Purity

[1294] Human embryonic kidney 293 (HEK293) and human lung carcinoma A549 cells were transfected with:
[1295] products of an unpurified GLuc circular RNA splicing reaction,
[1296] products of RNase R digestion of the splicing reaction,
[1297] products of RNase R digestion and HPLC purification of the splicing reaction, or
[1298] products of RNase digestion, HPLC purification, and phosphatase treatment of the splicing reaction.

[1299] RNase R digestion of splicing reactions was insufficient to prevent cytokine release in A549 cells in comparison to untransfected controls.

[1300] The addition of HPLC purification was also insufficient to prevent cytokine release, although there was a significant reduction in interleukin-6 (IL-6) and a significant increase in interferon-al (IFN-α1) compared to the unpurified splicing reaction.

[1301] The addition of a phosphatase treatment after HPLC purification and before RNase R digestion dramatically reduced the expression of all upregulated cytokines assessed in A549 cells. Secreted monocyte chemoattractant protein 1 (MCP1), IL-6, IFN-α1, tumor necrosis factor α (TNFα), and IFNγ inducible protein-10 (IP-10) fell to undetectable or un-transfected baseline levels.

[1302] There was no substantial cytokine release in HEK293 cells. A549 cells had increased GLuc expression stability and cell viability when transfected with higher purity circular RNA. Completely purified circular RNA had a stability phenotype similar to that of transfected 293 cells.

### Example 4B: Circular RNA does not Cause Significant Immunogenicity and is not a RIG-I Ligand

[1303] A549 cells were transfected with the products of a splicing reaction:

[1304] A549 cells were transfected with:
[1305] unpurified circular RNA,
[1306] high molecular weight (linear and circular concatenations) RNA,
[1307] circular (nicked) RNA,
[1308] an early fraction of purified circular RNA (more overlap with nicked RNA peak),
[1309] a late fraction of purified circular RNA (less overlap with nicked RNA peak),
[1310] introns excised during circularization, or
[1311] vehicle (i.e. untransfected control).

[1312] Precursor RNA was separately synthesized and purified in the form of the splice site deletion mutant (DS) due to difficulties in obtaining suitably pure linear precursor RNA from the splicing reaction. Cytokine release and cell viability was measured in each case.

[1313] Robust IL-6, RANTES, and IP-10 release was observed in response to most of the species present within the splicing reaction, as well as precursor RNA. Early circRNA fractions elicited cytokine responses comparable to other non-circRNA fractions, indicating that even relatively small quantities of linear RNA contaminants are able to induce a substantial cellular immune response in A549 cells. Late circRNA fractions elicited no cytokine response in excess of that from untransfected controls. A549 cell viability 36 hours post-transfection was significantly greater for late circRNA fractions compared with all of the other fractions.

[1314] RIG-I and IFN-β1 transcript induction upon transfection of A549 cells with late circRNA HPLC fractions, precursor RNA or unpurified splicing reactions were analyzed. Induction of both RIG-I and IFN-β1 transcripts were weaker for late circRNA fractions than precursor RNA and unpurified splicing reactions. RNase R treatment of splicing reactions alone was not sufficient to ablate this effect. Addition of very small quantities of the RIG-I ligand 3p-hpRNA to circular RNA induced substantial RIG-I transcription. In HeLa cells, transfection of RNase R-digested splicing reactions induced RIG-I and IFN-β1, but purified circRNA did not. Overall, HeLa cells were less sensitive to contaminating RNA species than A549 cells.

[1315] A time course experiment monitoring RIG-I, IFN-β1, IL-6, and RANTES transcript induction within the first 8 hours after transfection of A549 cells with splicing reactions or fully purified circRNA did not reveal a transient response to circRNA. Purified circRNA similarly failed to induce pro-inflammatory transcripts in RAW264.7 murine macrophages.

[1316] A549 cells were transfected with purified circRNA containing an EMCV IRES and EGFP expression sequence. This failed to produce substantial induction of pro-inflammatory transcripts. These data demonstrate that non-circular components of the splicing reaction are responsible for the immunogenicity observed in previous studies and that circRNA is not a natural ligand for RIG-I.

### Example 5

### Circular RNA Avoids Detection by TLRs

[1317] TLR 3, 7, and 8 reporter cell lines were transfected with multiple linear or circular RNA constructs and secreted embryonic alkaline phosphatase (SEAP) was measured.

[1318] Linearized RNA was constructed by deleting the intron and homology arm sequences. The linear RNA constructs were then treated with phosphatase (in the case of capped RNAs, after capping) and purified by HPLC.

[1319] None of the attempted transfections produced a response in TLR7 reporter cells. TLR3 and TLR8 reporter cells were activated by capped linearized RNA, polyadenylated linearized RNA, the nicked circRNA HPLC fraction, and the early circRNA fraction. The late circRNA fraction and m1ψ-mRNA did not provoke TLR-mediated response in any cell line.

[1320] In a second experiment, circRNA was linearized using two methods: treatment of circRNA with heat in the presence of magnesium ions and DNA oligonucleotide-guided RNase H digestion. Both methods yielded a majority of full-length linear RNA with small amounts of intact circRNA. TLR3, 7, and 8 reporter cells were transfected with circular RNA, circular RNA degraded by heat, or circular RNA degraded by RNase H, and SEAP secretion was measured 36 hours after transfection. TLR8 reporter cells secreted SEAP in response to both forms of degraded circular RNA, but did not produce a greater response to circular RNA transfection than mock transfection. No activation was observed in TLR3 and TLR7 reporter cells for degraded or intact conditions, despite the activation of TLR3 by in vitro transcribed linearized RNA.

### Example 6

### Unmodified Circular RNA Produces Increased Sustained In Vivo Protein Expression than Linear RNA

[1321] Mice were injected and HEK293 cells were transfected with unmodified and m1ψ-modified human erythropoietin (hEpo) linear mRNAs and circRNAs. Equimolar transfection of m1ψ-mRNA and unmodified circRNA resulted in robust protein expression in HEK293 cells. hEpo linear mRNA and circRNA displayed similar relative protein expression patterns and cell viabilities in comparison to GLuc linear mRNA and circRNA upon equal weight transfection of HEK293 and A549 cells.

[1322] In mice, hEpo was detected in serum after the injection of hEpo circRNA or linear mRNA into visceral adipose. hEpo detected after the injection of unmodified circRNA decayed more slowly than that from unmodified or m1ψ-mRNA and was still present 42 hours post-injection. Serum hEpo rapidly declined upon the injection of unpurified circRNA splicing reactions or unmodified linear mRNA. Injection of unpurified splicing reactions produced a cytokine response detectable in serum that was not observed for the other RNAs, including purified circRNA.

### Example 7

### Circular RNA can be Effectively Delivered In Vivo or In Vitro Via Lipid Nanoparticles

[1323] Purified circular RNA was formulated into lipid nanoparticles (LNPs) with the ionizable lipidoid cKK-E12 (Dong et al., 2014; Kauffman et al., 2015). The particles formed uniform multilamellar structures with an average size, polydispersity index, and encapsulation efficiency similar to that of particles containing commercially available control linear mRNA modified with 5moU.

[1324] Purified hEpo circRNA displayed greater expression than 5moU-mRNA when encapsulated in LNPs and added to HEK293 cells. Expression stability from LNP-RNA in HEK293 cells was similar to that of RNA delivered by transfection reagent, with the exception of a slight delay in decay for both 5moU-mRNA and circRNA. Both unmodified circRNA and 5moU-mRNA failed to activate RIG-I/IFN-β1 in vitro.

[1325] In mice, LNP-RNA was delivered by local injection into visceral adipose tissue or intravenous delivery to the liver. Serum hEpo expression from circRNA was lower but comparable with that from 5moU-mRNA 6 hours after delivery in both cases. Serum hEpo detected after adipose injection of unmodified LNP-circRNA decayed more slowly than that from LNP-5moU-mRNA, with a delay in expression decay present in serum that was similar to that noted in vitro, but serum hEpo after intravenous injection of LNP-circRNA or LNP-5moU-mRNA decayed at approximately the same rate. There was no increase in serum cytokines or local RIG-I, TNFα, or IL-6 transcript induction in any of these cases.

### Example 8

### Example 8A: Expression and Functional Stability by IRES in HEK293, HepG2, and 1C1C7 Cells

[1326] Constructs including Anabaena intron/exon regions, a Gaussia luciferase expression sequence, and varying IRES were circularized. 100 ng of each circularization reaction was separately transfected into 20,000 HEK293 cells, HepG2 cells, and 1C1C7 cells using Lipofectamine MessengerMax. Luminescence in each supernatant was assessed after 24 hours as a measure of protein expression. In HEK293 cells, constructs including Crohivirus B, Salivirus FHB, Aichi Virus, Salivirus HG-J1, and Enterovirus J IRES produced the most luminescence at 24 hours (FIG. 1A). In HepG2 cells, constructs including Aichi Virus, Salivirus FHB, EMCV-Cf, and CVA3 IRES produced high luminescence at 24 hours (FIG. 1B). In 1C1C7 cells, constructs including Salivirus FHB, Aichi Virus, Salivirus NG-J1, and Salivirus A SZ-1 IRES produced high luminescence at 24 hours (FIG. 1C).

[1327] A trend of larger IRES producing greater luminescence at 24 hours was observed. Shorter total sequence length tends to increase circularization efficiency, so selecting a high expression and relatively short IRES may result in an improved construct. In HEK293 cells, a construct using the Crohivirus B IRES produced the highest luminescence, especially in comparison to other IRES of similar length (FIG. 2A). Expression from IRES constructs in HepG2 and 1C1C7 cells plotted against IRES size are in FIGS. 2B and 2C.

[1328] Functional stability of select IRES constructs in HepG2 and 1C1C7 cells were measured over 3 days. Luminescence from secreted Gaussia luciferase in supernatant was measured every 24 hours after transfection of 20,000 cells with 100 ng of each circularization reaction, followed by complete media replacement. Salivirus A GUT and Salivirus FHB exhibited the highest functional stability in HepG2 cells, and Salivirus N-J1 and Salivirus FHB produced the most stable expression in 1C1C7 cells (FIGS. 3A and 3B).

### Example 8B: Screening of Additional IRES

[1329] Functional stability of additional IRES constructs in HEK293 cells were measured. Briefly, 5′ untranslated regions (UTRs) of interest were identified from GenBank. Selected UTRs UTRs were truncated to 675 nt from the 5′ end and inserted into a circular RNA backbone construct encoding Gaussia Luciferase (Gluc) and in front of the Gluc coding region. The circular RNAs were transfected into HEK293 cells. After 24 hours, the supernatants were collected and the luminescence from secreted Gluc protein was measured using commercially available reagents. The results are depicted in FIGS. 1D and 1E and Table 30, suggesting that many natural IRES sequences enhance the protein expression in a circular RNA context.

TABLE 30

| SEQ ID NO | IRES | Expression |
|---|---|---|
| 413 | RhPV | 1.10E+05 |
| 414 | Halastavi arva (1x mut) | 9.46E+04 |
| 415 | Oscivirus | 4.55E+07 |
| 416 | Cadicivirus B | 2.10E+05 |
| 417 | PSIV (2x mut for | 9.70E+04 |
| | Xba1) | |
| 418 | PSIV IGR | 1.01E+05 |
| 419 | PV Mahoney | 1.09E+05 |
| 420 | REV A | 9.44E+04 |
| 421 | Tropivirus A | 9.52E+04 |
| 422 | Symapivirus A | 1.27E+05 |
| 423 | Sakobuvirus A FFUP1 | 8.82E+06 |
| | (1x mut) | |
| 424 | Rosavirus C NFSM6F | 6.84E+05 |
| 425 | Rosavirus 2 GA7403 | 5.05E+06 |
| 426 | Rhimavirus A | 8.42E+05 |
| 427 | Rafivirus | 2.22E+05 |
| | LPXYC222841 | |
| 428 | Rafivirus | 4.53E+06 |
| | WHWGGF74766 | |
| 429 | Poecivirus BCCH-449 | 3.43E+05 |
| 430 | Megirivirus A LY | 1.80E+06 |
| 431 | Megirivirus E | 1.10E+07 |
| 432 | Megirivirus C | 1.24E+05 |
| 433 | Ludopivirus | 1.05E+05 |
| 434 | Livupivirus | 2.10E+05 |
| 435 | Aichivirus A FSS693 | 6.25E+07 |
| 436 | Aichivirus KVGH | 1.72E+07 |
| 437 | Aichivirus DV | 7.79E+07 |
| 438 | Murine Kobuvirus 1 | 1.60E+07 |
| 439 | Porcine Kobuvirus K- | N/A |
| | 30 | |
| 440 | Porcine Kobuvirus XX | 1.32E+07 |
| 441 | Caprine Kobuvirus | 2.87E+08 |
| | 12Q108 | |
| 442 | Rabbit Kobuvirus | 3.73E+07 |
| 443 | Aalivirus | 2.65E+05 |
| 444 | Grusopivirus A | 1.09E+05 |
| 445 | Grusopivirus B | 2.12E+05 |
| 446 | Yanchengosbecks | 1.57E+06 |
| | grenadier anchovy | |
| | picornavirus | |
| 447 | Turkey Gallivirus | 4.37E+05 |
| | M176 | |
| 448 | Falcovirus A1 | 1.48E+05 |
| 449 | Tremovirus B | 1.31E+05 |
| 450 | Didelphis aurita HAV | 1.38E+05 |
| 451 | Hepatovirus G1 | 1.41E+05 |
| 452 | Hepatovirus D | 1.47E+06 |
| 453 | Hepatovirus H2 | 1.08E+05 |
| 454 | Hepatovirus I | 8.79E+05 |
| 455 | Hepatovirus C | 5.08E+05 |
| 456 | Fipivirus A | 2.69E+05 |
| 457 | Fipivirus C | 1.09E+05 |
| 458 | Fipivirus E | 1.10E+05 |
| 459 | Aquamavirus | 4.51E+06 |
| 460 | Avisivirus A | 1.91E+05 |
| 461 | Avisivirus B | 8.68E+04 |
| 462 | Crohivirus A | 9.96E+04 |
| 463 | Kunsagivirus B | 8.01E+04 |
| 464 | Limnipivirus A | 8.30E+04 |
| 465 | Limnipivirus C | 1.35E+05 |
| 466 | Orivirus | 6.09E+05 |
| 467 | HAV FH1 | 1.24E+05 |
| 468 | HAV HM175 | 4.96E+05 |
| 469 | Parechovirus F | 6.56E+05 |
| 470 | Parechovirus D | 3.10E+05 |
| 471 | Parechovirus C | 1.24E+06 |
| 472 | Ljungan Virus 87-012 | 2.00E+06 |
| 473 | Parechovirus A2 | 1.80E+07 |
| 474 | Parechovirus A3 | 3.58E+06 |
| 475 | Parechovirus A8 | 1.61E+07 |
| 476 | Parechovirus A17 | 1.20E+06 |
| 477 | Potamipivirus A | 8.43E+05 |
| 478 | Potamipivirus B | 7.20E+05 |
| 479 | Beihai Conger | 1.15E+06 |
| | Picornavirus | |
| 480 | Porcine Sapelovirus | N/A |
| | JD2011 | |
| 481 | Porcine Sapelovirus | 4.34E+06 |
| | A2 | |
| 482 | Simian Sapelovirus 1 | 6.55E+07 |
| 483 | Simian Sapelovirus 2 | 4.24E+07 |
| 484 | Rabovirus C | 2.49E+06 |
| 485 | Rabovirus A NYC-B10 | 1.24E+06 |
| 486 | Parabovirus C | 1.83E+07 |
| 487 | Parabovirus B | 7.85E+06 |
| 488 | Parabovirus A3 | 2.44E+08 |
| 489 | Felipivirus 127F | 8.92E+06 |
| 490 | Boosepivirus A | 7.07E+07 |
| 491 | Boosepivirus B | 1.17E+08 |
| 492 | Phacovirus Pf-CHK1 | 5.87E+06 |
| 493 | HRVC3 QPM | 1.64E+07 |
| 494 | HRVB27 | 2.04E+08 |
| 495 | HRVA73 | 1.08E+08 |
| 496 | EV L | 6.49E+07 |
| 497 | EV K | 7.52E+07 |
| 498 | EV J 1631 | 9.88E+07 |
| 499 | EVJ N125 | 2.90E+07 |
| 500 | EV I | 1.31E+08 |
| 501 | EV F1 BEV 261 | 1.12E+07 |
| 502 | EV D94 | 9.25E+07 |
| 503 | PV3 | 1.25E+08 |
| 504 | EV C102 | 8.85E+07 |
| 505 | EV 30 | 5.48E+06 |
| 506 | SAS | 1.61E+08 |
| 507 | EV A114 | 1.50E+08 |
| 508 | Mobovirus A | 3.44E+06 |
| 509 | Burpengary Virus | 1.09E+07 |
| 510 | Hunnivirus A1 | 1.61E+06 |
| 511 | Hunnivirus A2 | 6.38E+06 |
| 512 | Ia Io | 1.35E+06 |
| 513 | Taura Syndrome Virus | 8.30E+05 |
| 514 | ABPV | 6.48E+05 |
| 515 | BRAV-2 | 3.98E+06 |
| 516 | BRBV-1 | 3.34E+06 |
| 517 | ERAV-1 U188 | N/A |
| 518 | GFTV | 1.23E+06 |
| 519 | SAFV V13C | 9.32E+07 |
| 520 | SAV P-113 | 4.37E+07 |
| 521 | VHEV | 1.74E+08 |
| 522 | TRV NGS910 | 3.84E+07 |
| 523 | EMCV2 RD1338 | 1.97E+06 |
| 524 | EMCV1 JZ1203 | N/A |
| 525 | EMCV1 AnrB-3741 | 2.55E+06 |
| 526 | Cosavirus D1 | 2.11E+06 |
| 527 | Cosavirus B1 | 1.91E+06 |
| 528 | Cosavirus A SH1 | 2.16E+06 |
| 529 | Malagasivirus B | 5.05E+06 |
| 530 | Mosavirus A2 SZAL6 | 8.27E+06 |
| 531 | SVV | 1.06E+06 |
| 532 | PTV A | 7.29E+05 |
| 533 | PTV B | 6.02E+06 |
| 534 | Tottorivirus | 2.76E+07 |
| 535 | Posavirus 1 | 1.55E+06 |
| 536 | A105-675 | 2.18E+07 |
| 537 | A110-675 | 1.24E+08 |
| 538 | 18-675 | 6.04E+07 |
| 539 | A115-675 | 5.93E+07 |
| 540 | A73-675 | 1.30E+08 |
| 541 | Kobuvirus 16317 | 2.03E+07 |
| 542 | Aichivirus Chshc7 | 1.87E+07 |
| 543 | Aichivirus Goiania | 1.66E+07 |
| 544 | Aichivirus ETHP4 | 1.78E+07 |
| 545 | Aichivirus DVI2169 | 2.98E+06 |
| 546 | Aichivirus DVI2321 | 6.63E+07 |
| 547 | Aichivirus rat08 | 3.51E+07 |
| 548 | Aichivirus Rt386 | 5.71E+07 |
| 549 | Norway Rat Pestivirus | N/A |
| 550 | Porcine Kobuvirus | 44200000 |
| | GS2 | |
| 551 | Kobuvirus SZAL6 | 98850000 |
| 552 | Kobuvirus sheep TB3 | N/A |
| 553 | Pronghorn antelope | 1.35E+06 |
| | pestivirus | |
| 554 | Porcine pestivirus | |
| | isolate Bungowannah | 1.10E+07 |
| 555 | Porcine pestivirus 1 | 9.46E+04 |
| 556 | Pestivirus giraffe-1 | 4.72E+05 |
| 557 | Classical swine fever | 3.16E+05 |
| | virus | |
| 558 | Human pegivirus | 6.85E+05 |
| | isolate JD2B1I | |
| 559 | Human pegivirus | N/A |
| | isolate GBV-C-ZJ | |
| 560 | Human pegivirus | 5.36E+05 |
| | isolate JD2B8C | |
| 561 | Hepatitis GB virus A | N/A |
| 562 | Simian pegivirus | 8.56E+04 |
| 563 | Pegivirus I | 8.02E+04 |
| 564 | Pegivirus K | 8.07E+04 |
| 565 | Theiler's disease- | 7.84E+04 |
| | associated virus | |
| 566 | Rodent pegivirus | 1.79E+05 |
| 567 | Human pegivirus 2 | 3.14E+05 |
| 568 | GB virus C/Hepatitis G | 1.36E+05 |
| | virus | |
| 569 | Equine Pegivirus 1 | 8.80E+04 |
| 570 | Culex theileri | 8.52E+04 |
| | flavivirus | |
| 571 | Bussuquara virus | 8.20E+04 |
| 572 | Zika Virus | 8.61E+04 |
| 573 | Yokose virus | 8.55E+04 |
| 574 | Wesselsbron virus | N/A |
| 575 | Equine hepacivirus | 8.40E+04 |
| 576 | Hepacivirus B | 8.84E+04 |
| 577 | Hepacivirus I | 7.50E+04 |
| 578 | Hepacivirus J | 7.65E+04 |
| 579 | Hepacivirus K | 8.91E+04 |
| 580 | Icavirus | 4.41E+06 |
| 581 | Antarctic penguin virus | 8.42E+04 |
| | A | |
| 582 | Forest pouched giant | N/A |
| | rat arterivirus | |
| 583 | Avisivirus Pf-CHK1 | 1.19E+05 |
| 584 | Avian paramyxovirus | 9.91E+04 |
| | penguin | |
| 585 | Newcastle disease | 8.86E+04 |
| | virus | |
| 586 | Bat Hp- | 8.47E+04 |
| | betacoronavilus | |
| 587 | Basella alba | 7.65E+04 |
| | endornavirus | |
| 588 | Ball python nidovirus | 8.25E+04 |
| 589 | Bat sapelovirus | 8.05E+04 |
| 590 | Bat Picornavirus 3 | N/A |
| 591 | Bat Picornavirus 2 | 7.99E+07 |
| 592 | Bat Picornavirus 1 | 1.85E+07 |
| 593 | Bat Iflavirus | 9.76E+04 |
| 594 | Bat dicibavirus | 7.43E+04 |
| 595 | Betacoronavirus | 8.96E+04 |
| | HKU24 | |
| 596 | Betacoronavirus | 8.74E+04 |
| | England 1 | |
| 597 | Boone cardiovirus 1 | 2.62E+06 |
| 598 | Breda virus | 1.16E+05 |
| 599 | Bovine viral diarrhea | 2.70E+06 |
| | virus 3 | |
| 600 | Bovine rhinitis A virus | 3.62E+06 |
| 601 | Bovine picornavirus | 1.21E+05 |
| | isolate TCH6 | |
| 602 | Bovine nidovirus | 1.17E+05 |
| | TCH5 | |
| 603 | Bovine hepacivirus | 1.89E+05 |
| 604 | Botrytis cinerea | 9.68E+04 |
| | mitovirus 4 RdRp | |
| 605 | Botrytis cinerea | 8.73E+04 |
| | mitovirus 2 RdRp | |
| 606 | Canine | 2.79E+06 |
| | picodicistrovirus strain | |
| | 209 | |
| 607 | Canine distemper virus | 3.02E+05 |
| 608 | Canine kobuvirus | 1.48E+08 |
| 609 | Camel | 2.48E+05 |
| | alphacoronavirus | |
| 610 | Cripavirus | 1.95E+05 |
| 611 | Human coxsackievirus | 7.75E+07 |
| | A2 | |
| 612 | Coronavirus AcCoV- | 1.82E+05 |
| | JC34 | |
| 613 | Chicken picornavirus 3 | 9.13E+04 |
| 614 | Chicken picornavirus 1 | 1.21E+05 |
| 615 | Chicken orivirus 1 | 3.16E+05 |
| 616 | Chicken gallivirus 1 | 1.51E+07 |
| 617 | Chicken calicivirus | 1.28E+05 |
| 618 | Carp picornavirus 1 | 1.13E+05 |
| 619 | Falcon picornavirus | 3.08E+06 |
| 620 | Equine rhinitis B virus | 1.01E+05 |
| | 1 | |
| 621 | Equine rhinitis A virus | 3.73E+05 |
| 622 | Equine arteritis virus | 1.89E+05 |
| 623 | Enterovirus sp. isolate | 6.83E+07 |
| | CPML | |
| 624 | Enterovirus AN12 | 3.87E+06 |
| 625 | Dolphin morbillivirus | 1.22E+05 |
| 626 | Dianke virus | 1.35E+05 |
| 627 | Guereza hepacivirus | 1.38E+05 |
| 628 | Grapevine associated | 1.30E+05 |
| | narnavirus-1 | |
| 629 | Goat torovirus | 1.19E+05 |
| 630 | Foot-and-mouth | 1.12E+05 |
| | disease virus O isolate | |
| 631 | Feline infectious | 1.35E+05 |
| | peritonitis virus | |
| 632 | Farmington virus | 1.22E+05 |
| 633 | Avian infectious | 2.84E+05 |
| | bronchitis virus | |
| 634 | Human rhinovirus 1 | 7.40E+07 |
| 635 | EV22 | 1.95E+07 |
| 636 | Human TMEV-like | 4.48E+07 |
| | cardiovirus | |
| 637 | Human coronavilus | N/A |
| | 229E | |
| 638 | Hubei zhaovirus-like | 1.03E+05 |
| | virus 1 | |
| 639 | Hubei tombus-like | 9.28E+04 |
| | virus 9 | |
| 640 | Hubei tombus-like | 9.23E+04 |
| | virus 32 | |
| 641 | Hubei sobemo-like | 1.17E+05 |
| | virus 3 | |
| 642 | Hubei picorna-like | 1.95E+05 |
| | virus 2 | |
| 643 | Hepacivirus P | 6.04E+05 |
| 644 | Harrier picornavirus 1 | 1.47E+05 |
| 645 | Kunsagivirus 1 | 4.15E+05 |
| 646 | Kagoshima-2-24-KoV | 9.30E+07 |
| 647 | Kashmir bee virus | 1.65E+05 |
| 648 | Jingmen picorna-like | 9.32E+04 |
| | virus | |
| 649 | Mumps virus | 1.47E+05 |
| 650 | Mouse Mosavirus | 9.00E+04 |
| 651 | Miniopterus | 6.05E+06 |
| | schreibersii | |
| | picornavirus 1 | |
| 652 | Linda virus | 7.37E+05 |
| 653 | Lesavirus 2 | 3.67E+07 |
| 654 | Lesavirus 1 | 6.37E+06 |
| 655 | Phopivirus strain | 1.06E+05 |
| | NewEngland | |
| 656 | Pestivirus strain Aydin | 3.11E+06 |
| 657 | Quail picornavirus | 6.55E+07 |
| | QPV1 | |
| 658 | Porcine sapelovirus 1 | N/A |
| 659 | Porcine reproductive | 1.29E+05 |
| | and respiratory | |
| | syndrome virus 2 | |
| 660 | Porcine enterovirus 9 | 3.20E+07 |
| 661 | Pigeon picornavirus B | 1.24E+05 |
| 662 | Picornavirus HK21 | 4.09E+05 |
| 663 | Picornavirales Tottori- | 9.54E+04 |
| | HG1 | |
| 664 | Rodent hepatovirus | 1.39E+05 |
| 665 | Rinderpest virus | 4.26E+05 |
| 666 | Rabovirus A | 2.88E+06 |
| 667 | Shingleback nidovirus | 2.62E+05 |
| | 1 | |
| 668 | Seneca valley virus | 1.46E+07 |
| 669 | Sclerotinia | 1.69E+05 |
| | sclerotiorum dsRNA | |
| | mycovirus-L | |
| 670 | Yak enterovirus | 6.19E+06 |
| 671 | Wobbly possum | 2.60E+05 |
| | disease virus | |
| 672 | Avian orthoreovirus | 4.37E+05 |
| | segment S1 | |
| 673 | Caprine Kobuvirus d10 | 2.20E+08 |
| 674 | Caprine Kobuvirus d20 | 2.00E+08 |
| 675 | Caprine Kobuvirus d30 | 1.87E+08 |
| 676 | Caprine Kobuvirus d40 | 2.15E+08 |
| 677 | Caprine Kobuvirus d50 | 9.65E+07 |
| 678 | Picornavirales sp. | 2'26E+08 |
| | isolate RtMruf-PicoV | |
| 679 | Apodemus agrarius | 1.90E+08 |
| | picornavirus strain | |
| | Longquan-Aa118 | |
| 680 | Niviventer confucianus | 6.10E+07 |
| | picornavirus | |
| 681 | Bat picornavirus | 1.13E+06 |
| | isolate BtRs-PicoV | |
| 682 | Rhinolophus | N/A |
| | picornavirus strain | |
| | Guizhou -Rr100 | |
| 683 | Rhinolophus | 3.85E+05 |
| | picornavirus strain | |
| | Henan-Rf265 | |
| 684 | Human enterovirus | 5.49E+05 |
| | C105 | |
| 685 | Human poliovirus 1 | 3.94E+05 |
| | strain NIE1116623 | |
| 686 | Human enterovirus 109 | 4.92E+05 |
| 687 | Human poliovirus 2 | 2.59E+07 |
| | strain NIE0811460 | |
| 688 | Bovine picornavirus | 3.82E+06 |
| 689 | Human poliovirus 1 | 2.44E+05 |
| | strain EQG1419328 | |
| 690 | Human poliovirus 2 | 5.84E+06 |
| | isolate IS_061 | |
| 691 | Coxsackievirus B5 | N/A |
| 692 | Coxsackievirus A10 | N/A |

### Example 9

### Expression and Functional Stability by IRES in Jurkat Cells

[1330] 2 sets of constructs including Anabaena intron/exon regions, a Gaussia luciferase expression sequence, and a subset of previously tested IRES were circularized. 60,000 Jurkat cells were electroporated with 1 μg of each circularization reaction. Luminescence from secreted Gaussia luciferase in supernatant was measured 24 hours after electroporation. A CVB3 IRES construct was included in both sets for comparison between sets and to previously defined IRES efficacy. CVB1 and Salivirus A SZ1 IRES constructs produced the most expression at 24h. Data can be found in FIGS. 4A and 4B.

[1331] Functional stability of the IRES constructs in each round of electroporated Jurkat cells was measured over 3 days. Luminescence from secreted Gaussia luciferase in supernatant was measured every 24 hours after electroporation of 60,000 cells with 1 μg of each circularization reaction, followed by complete media replacement (FIGS. 5A and 5B).

[1332] Salivirus A SZ1 and Salivirus A BN2 IRES constructs had high functional stability compared to other constructs.

### Example 10

### Expression, Functional Stability, and Cytokine Release of Circular and Linear RNA in Jurkat Cells

[1333] A construct including Anabaena intron/exon regions, a Gaussia luciferase expression sequence, and a Salivirus FHB IRES was circularized. mRNA including a Gaussia luciferase expression sequence and a ˜150 nt polyA tail, and modified to replace 100% of uridine with 5-methoxy uridine (5moU) is commercially available and was purchased from Trilink. 5moU nucleotide modifications have been shown to improve mRNA stability and expression (Bioconjug Chem. 2016 Mar. 16; 27(3):849-53). Expression of modified mRNA, circularization reactions (unpure), and circRNA purified by size exclusion HPLC (pure) in Jurkat cells were measured and compared (FIG. 6A). Luminescence from secreted Gaussia luciferase in supernatant was measured 24 hours after electroporation of 60,000 cells with 1 μg of each RNA species.

[1334] Luminescence from secreted Gaussia luciferase in supernatant was measured every 24 hours after electroporation of 60,000 cells with 1 ug of each RNA species, followed by complete media replacement. A comparison of functional stability data of modified mRNA and circRNA in Jurkat cells over 3 days is in FIG. 6B.

[1335] IFNγ (FIG. 7A), IL-6 (FIG. 7B), IL-2 (FIG. 7C), RIG-I (FIG. 7D), IFN-β1 (FIG. 7E), and TNFα (FIG. 7F) transcript induction was measured 18 hours after electroporation of 60,000 Jurkat cells with 1 μg of each RNA species described above and 3p-hpRNA (5′ triphosphate hairpin RNA, which is a known RIG-I agonist).

### Example 11

### Expression of Circular and Linear RNA in Monocytes and Macrophages

[1336] A construct including Anabaena intron/exon regions, a Gaussia luciferase expression sequence, and a Salivirus FHB IRES was circularized. mRNA including a Gaussia luciferase expression sequence and a ˜150 nt polyA tail, and modified to replace 100% of uridine with 5-methoxy uridine (5moU) was purchased from Trilink. Expression of circular and modified mRNA was measured in human primary monocytes (FIG. 8A) and human primary macrophages (FIG. 8B). Luminescence from secreted Gaussia luciferase in supernatant was measured 24 hours after electroporation of 60,000 cells with 1 μg of each RNA species. Luminescence was also measured 4 days after electroporation of human primary macrophages with media changes every 24 hours (FIG. 8C). The results can be found in FIG. 8. The difference in luminescence was statistically significant in each case (p <0.05).

### Example 12

### Expression and Functional Stability by IRES in Primary T Cells

[1337] Constructs including Anabaena intron/exon regions, a Gaussia luciferase expression sequence, and a subset of previously tested IRES were circularized and reaction products were purified by size exclusion HPLC. 150,000 primary human CD3+ T cells were electroporated with 1 μg of each circRNA. Luminescence from secreted Gaussia luciferase in supernatant was measured 24 hours after electroporation (FIG. 9A). Aichi Virus and CVB3 IRES constructs had the most expression at 24 hours.

[1338] Luminescence was also measured every 24 hours after electroporation for 3 days in order to compare functional stability of each construct (FIG. 9B). The construct with a Salivirus A SZ1 IRES was the most stable.

### Example 13

### Expression and Functional Stability of Circular and Linear RNA in Primary T Cells and PBMCs

[1339] Constructs including Anabaena intron/exon regions, a Gaussia luciferase expression sequence, and a Salivirus A SZ1 IRES or Salivirus FHB IRES were circularized. mRNA including a Gaussia luciferase expression sequence and a ˜150 nt polyA tail, and modified to replace 100% of uridine with 5-methoxy uridine (5moU) and was purchased from Trilink. Expression of Salivirus A SZ1 IRES HPLC purified circular and modified mRNA was measured in human primary CD3+ T cells. Expression of Salivirus FHB HPLC purified circular, unpurified circular and modified mRNA was measured in human PBMCs. Luminescence from secreted Gaussia luciferase in supernatant was measured 24 hours after electroporation of 150,000 cells with 1 μg of each RNA species. Data for primary human T cells is shown in FIGS. 10A and 10B, and data for PBMCs is shown in FIG. 10C. The difference in expression between the purified circular RNA and unpurified circular RNA or linear RNA was significant in each case (p<0.05).

[1340] Luminescence from secreted Gaussia luciferase in primary T cell supernatant was measured every 24 hours after electroporation over 3 days in order to compare construct functional stability. Data is shown in FIG. 10B. The difference in relative luminescence from the day 1 measurement between purified circular RNA and linear RNA was significant at both day 2 and day 3 for primary T cells.

### Example 14

### Circularization Efficiency by Permutation Site in Anabaena Intron

[1341] RNA constructs including a CVB3 IRES, a Gaussia luciferase expression sequence, Anabaena intron/exon regions, spacers, internal homology regions, and homology arms were produced. Circularization efficiency of constructs using the traditional Anabaena intron permutation site and 5 consecutive permutations sites in P9 was measured by HPLC. HPLC chromatograms for the 5 consecutive permutation sites in P9 are shown in FIG. 11A.

[1342] Circularization efficiency was measured at a variety of permutation sites. Circularization efficiency is defined as the area under the HPLC chromatogram curve for each of: circRNA/(circRNA+precursor RNA). Ranked quantification of circularization efficiency at each permutation site is in FIG. 11B. 3 permutation sites (indicated in FIG. 11B) were selected for further investigation.

[1343] Circular RNA in this example was circularized by in vitro transcription (IVT) then purified via spin column. Circularization efficiency for all constructs would likely be higher if the additional step of incubation with Mg2+ and guanosine nucleotide were included; however, removing this step allowed for comparison between, and optimization of, circular RNA constructs. This level of optimization is especially useful for maintaining high circularization efficiency with large RNA constructs, such as those encoding chimeric antigen receptors.

### Example 15

### Circularization Efficiency of Alternative Introns

[1344] Precursor RNA containing a permuted group 1 intron of variable species origin or permutation site and several constant elements including: a CVB3 IRES, a Gaussia luciferase expression sequence, spacers, internal homology regions, and homology arms were created. Circularization data can be found in FIG. 12. FIG. 12A shows chromatograms resolving precursor, CircRNA and introns. FIG. 12B provides ranked quantification of circularization efficiency, based on the chromatograms shown in FIG. 12A, as a function of intron construct.

[1345] Circular RNA in this example was circularized by in vitro transcription (IVT) then spin column purification. Circularization efficiency for all constructs would likely be higher if the additional step of incubation with Mg2+ and guanosine nucleotide were included; however, removing this step allows for comparison between, and optimization of, circular RNA constructs. This level of optimization is especially useful for maintaining high circularization efficiency with large RNA constructs, such as those encoding chimeric antigen receptors.

### Example 16

### Circularization Efficiency by Homology Arm Presence or Length

[1346] RNA constructs including a CVB3 IRES, a Gaussia luciferase expression sequence, Anabaena intron/exon regions, spacers, and internal homology regions were produced. Constructs representing 3 Anabaena intron permutation sites were tested with 30 nt, 25% GC homology arms or without homology arms (“NA”). These constructs were allowed to circularize without an Mg²⁺ incubation step. Circularization efficiency was measured and compared. Data can be found in FIGS. 13A and 13B. Circularization efficiency was higher for each construct lacking homology arms. FIG. 13A provides ranked quantification of circularization efficiency; FIG. 13B provides chromatograms resolving precursor, circRNA and introns.

[1347] For each of the 3 permutation sites, constructs were created with 10 nt, 20 nt, and 30 nt arm lengths and 25%, 50%, and 75% GC content. Splicing efficiency of these constructs was measured and compared to constructs without homology arms (FIG. 14). Splicing efficiency is defined as the proportion of free introns relative to the total RNA in the splicing reaction.

[1348] FIG. 15 A (left) shows HPLC chromatograms indicating the contribution of strong homology arms to improved splicing efficiency. Top left: 75% GC content, 10 nt homology arms. Center left: 75% GC content, 20 nt homology arms. Bottom left: 75% GC content, 30 nt homology arms.

[1349] FIG. 15 A (right) shows HPLC chromatograms showing increased splicing efficiency paired with increased nicking, appearing as a shoulder on the circRNA peak. Top right: 75% GC content, 10 nt homology arms. Center right: 75% GC content, 20 nt homology arms. Bottom right: 75% GC content, 30 nt homology arms.

[1350] FIG. 15 B (left) shows select combinations of permutation sites and homology arms hypothesized to demonstrate improved circularization efficiency.

[1351] FIG. 15 B (right) shows select combinations of permutation sites and homology arms hypothesized to demonstrate improved circularization efficiency, treated with E. coli polyA polymerase.

[1352] Circular RNA in this example was circularized by in vitro transcription (IVT) then spin-column purified. Circularization efficiency for all constructs would likely be higher if an additional Mg2+ incubation step with guanosine nucleotide were included; however, removing this step allowed for comparison between, and optimization of, circular RNA constructs. This level of optimization is especially useful for maintaining high circularization efficiency with large RNA constructs, such as those encoding chimeric antigen receptors.

### Example 17

### Circular RNA Encoding Chimeric Antigen Receptors

[1353] Constructs including Anabaena intron/exon regions, a Kymriah chimeric antigen receptors (CAR) expression sequence, and a CVB3 IRES were circularized. 100,000 human primary CD3+ T cells were electroporated with 500 ng of circRNA and co-cultured for 24 hours with Raji cells stably expressing GFP and firefly luciferase. Effector to target ratio (E:T ratio) 0.75:1. 100,000 human primary CD3+ T cells were mock electroporated and co-cultured as a control (FIG. 16).

[1354] Sets of 100,000 human primary CD3+ T cells were mock electroporated or electroporated with 1 μg of circRNA then co-cultured for 48 hours with Raji cells stably expressing GFP and firefly luciferase E:T ratio 10:1 (FIG. 17).

[1355] Quantification of specific lysis of Raji target cells was determined by detection of firefly luminescence (FIG. 18). 100,000 human primary CD3+ T cells either mock electroporated or electroporated with circRNA encoding different CAR sequences were co-cultured for 48 hours with Raji cells stably expressing GFP and firefly luciferase. % Specific lysis defined as 1-[CAR condition luminescence]/[mock condition luminescence]. E:T ratio 10:1.

### Example 18

### Expression and Functional Stability of Circular and Linear RNA in Jurkat Cells and Resting Human T Cells

[1356] Constructs including Anabaena intron/exon regions, a Gaussia luciferase expression sequence, and a subset of previously tested IRES were circularized and reaction products were purified by size exclusion HPLC. 150,000 Jurkat cells were electroporated with 1 μg of circular RNA or 5moU-mRNA. Luminescence from secreted Gaussia luciferase in supernatant was measured 24 hours after electroporation (FIG. 19A left). 150,000 resting primary human CD3+ T cells (10 days post-stimulation) were electroporated with 1 of circular RNA or 5moU-mRNA. Luminescence from secreted Gaussia luciferase in supernatant was measured 24 hours after electroporation (FIG. 19A right).

[1357] Luminescence from secreted Gaussia luciferase in supernatant was measured every 24 hours after electroporation, followed by complete media replacement. Functional stability data shown in FIG. 19B. Circular RNA had more functional stability than linear RNA in each case, with a more pronounced difference in Jurkat cells.

### Example 19

### IFN-β1, RIG-I, IL-2, IL-6, IFNγ, and TNFα Transcript Induction of Cells Electroporated with Linear RNA or Varying Circular RNA Constructs

[1358] Constructs including Anabaena intron/exon regions, a Gaussia luciferase expression sequence, and a subset of previously tested IRES were circularized and reaction products were purified by size exclusion HPLC. 150,000 CD3+ human T cells were electroporated with 1 μg of circular RNA, 5moU-mRNA, or immunostimulatory positive control poly inosine:cytosine. IFN-β1 (FIG. 20A), RIG-I (FIG. 20B), IL-2 (FIG. 20C), IL-6 (FIG. 20D), IFNγ (FIG. 20E), and TNFα (FIG. 20F) transcript induction was measured 18 hours after electroporation.

### Example 20

### Specific Lysis of Target Cells and IFNγ Transcript Induction by CAR Expressing Cells Electroporated with Different Amounts of Circular or Linear RNA; Specific Lysis of Target and Non-Target Cells by CAR Expressing Cells at Different E:T Ratios

[1359] Constructs including Anabaena intron/exon regions, an anti-CD19 CAR expression sequence, and a CVB3 IRES were circularized and reaction products were purified by size exclusion HPLC. 150,000 human primary CD3+ T cells either mock electroporated or electroporated with different quantities of circRNA encoding an anti-CD19 CAR sequence were co-cultured for 12 hours with Raji cells stably expressing GFP and firefly luciferase at an E:T ratio of 2:1. Specific lysis of Raji target cells was determined by detection of firefly luminescence (FIG. 21A). % Specific lysis was defined as 1-[CAR condition luminescence]/[mock condition luminescence]. IFNγ transcript induction was measured 24 hours after electroporation (FIG. 21B).

[1360] 150,000 human primary CD3+ T cells were either mock electroporated or electroporated with 500 ng circRNA or m1ψ-mRNA encoding an anti-CD19 CAR sequence, then co-cultured for 24 hours with Raji cells stably expressing firefly luciferase at different E:T ratios. % Specific lysis of Raji target cells was determined by detection of firefly luminescence (FIG. 22A). % Specific lysis was defined as 1-[CAR condition luminescence]/[mock condition luminescence].

[1361] CAR expressing T cells were also co-cultured for 24 hours with Raji or K562 cells stably expressing firefly luciferase at different E:T ratios. Specific lysis of Raji target cells or K562 non-target cells was determined by detection of firefly luminescence (FIG. 22B). % Specific lysis is defined as 1-[CAR condition luminescence]/[mock condition luminescence].

### Example 21

### Specific Lysis of Target Cells by T Cells Electroporated with Circular RNA or Linear RNA Encoding a CAR

[1362] Constructs including Anabaena intron/exon regions, an anti-CD19 CAR expression sequence, and a CVB3 IRES were circularized and reaction products were purified by size exclusion HPLC. Human primary CD3+ T cells were electroporated with 500 ng of circular RNA or an equimolar quantity of m1ψ-mRNA, each encoding a CD19-targeted CAR. Raji cells were added to CAR-T cell cultures over 7 days at an E:T ratio of 10:1. % Specific lysis was measured for both constructs at 1, 3, 5, and 7 days (FIG. 23).

### Example 22

### Specific Lysis of Raji Cells by T Cells Expressing an Anti-CD19 CAR or an Anti-BCMA CAR

[1363] Constructs including Anabaena intron/exon regions, anti-CD19 or anti-BCMA CAR expression sequence, and a CVB3 IRES were circularized and reaction products were purified by size exclusion HPLC. 150,000 primary human CD3+ T cells were electroporated with 500 ng of circRNA, then were co-cultured with Raji cells at an E:T ratio of 2:1. % Specific lysis was measured 12 hours after electroporation (FIG. 24).

### Example 23

### Example 23A: Synthesis of Compounds

[1364] Synthesis of representative ionizable lipids of the invention are described in PCT applications PCT/US2016/052352, PCT/US2016/068300, PCT/US2010/061058, PCT/US2018/058555, PCT/US2018/053569, PCT/US2017/028981, PCT/US2019/025246, PCT/US2018/035419, PCT/US2019/015913, and US applications with publication numbers 20190314524, 20190321489, and 20190314284, the contents of each of which are incorporated herein by reference in their entireties.

### Example 23B: Synthesis of Compounds

[1365] Synthesis of representative ionizable lipids of the invention are described in US patent publication number US20170210697A1, the contents of of which is incorporated herein by reference in its entirety.

### Example 24

### Protein Expression by Organ

[1366] Circular or linear RNA encoding FLuc was generated and loaded into transfer vehicles with the following formulation: 50% ionizable lipid 15 in Table 10b, 10% DSPC, 1.5% PEG-DMG, 38.5% cholesterol. CD-1 mice were dosed at 0.2 mg/kg and luminescence was measured at 6 hours (live IVIS) and 24 hours (live IVIS and ex vivo IVIS). Total Flux (photons/second over a region of interest) of the liver, spleen, kidney, lung, and heart was measured (FIGS. 25 and 26).

### Example 25

### Distribution of Expression in the Spleen

[1367] Circular or linear RNA encoding GFP is generated and loaded into transfer vehicles with the following formulation: 50% ionizable lipid 15 in Table 10b, 10% DSPC, 1.5% PEG-DMG, 38.5% cholesterol. The formulation is administered to CD-1 mice. Flow cytometry is run on spleen cells to determine the distribution of expression across cell types.

### Example 26

### Production of Nanoparticle Compositions

[1368] In order to investigate safe and efficacious nanoparticle compositions for use in the delivery of circular RNA to cells, a range of formulations are prepared and tested. Specifically, the particular elements and ratios thereof in the lipid component of nanoparticle compositions are optimized.

[1369] Nanoparticles can be made in a 1 fluid stream or with mixing processes such as microfluidics and T-junction mixing of two fluid streams, one of which contains the circular RNA and the other has the lipid components.

[1370] Lipid compositions are prepared by combining an ionizable lipid, optionally a helper lipid (such as DOPE, DSPC, or oleic acid obtainable from Avanti Polar Lipids, Alabaster, Ala.), a PEG lipid (such as 1,2-dimyristoyl-sn-glycerol methoxypolyethylene glycol, also known as PEG-DMG, obtainable from Avanti Polar Lipids, Alabaster, Ala.), and a structural lipid such as cholesterol at concentrations of about, e.g., 40 or 50 mM in a solvent, e.g., ethanol. Solutions should be refrigerated for storage at, for example, −20° C. Lipids are combined to yield desired molar ratios (see, for example, Tables 31a and 31b below) and diluted with water and ethanol to a final lipid concentration of e.g., between about 5.5 mM and about 25 mM.

TABLE 31a

| Formulation | |
|---|---|
| number | Description |
| 1 | Aliquots of 50 mg/mL ethanolic solutions of C12-200, DOPE, Chol and DMG- |
| | PEG2K (40:30:25:5) are mixed and diluted with ethanol to 3 mL final volume. |
| | Separately, an aqueous buffered solution (10 mM citrate/150 mM NaCl, pH 4.5) of |
| | circRNA is prepared from a 1 mg/mL stock. The lipid solution is injected rapidly |
| | into the aqueous circRNA solution and shaken to yield a final suspension in 20% |
| | ethanol. The resulting nanoparticle suspension is filtered, diafiltrated with 1 × PBS |
| | (pH 7.4), concentrated and stored at 2-8° C. |
| 2 | Aliquots of 50 mg/mL ethanolic solutions of DODAP, DOPE, cholesterol and |
| | DMG-PEG2K (18:56:20:6) are mixed and diluted with ethanol to 3 mL final |
| | volume. Separately, an aqueous buffered solution (10mM citrate/150mM NaCl, |
| | pH 4.5) of EPO circRNA is prepared from a 1 mg/mL stock. The lipid solution is |
| | injected rapidly into the aqueous circRNA solution and shaken to yield a final |
| | suspension in 20% ethanol. The resulting nanoparticle suspension is filtered, |
| | diafiltrated with 1 × PBS (pH 7.4), concentrated and stored at 2-8° C. Final |
| | concentration = 1.35 mg/mL EPO circRNA (encapsulated). Zave = 75.9 nm |
| | (Dv(50) = 57.3 nm; Dv(90) = 92.1 nm). |
| 3 | Aliquots of 50 mg/mL ethanolic solutions of HGT4003, DOPE, cholesterol and |
| | DMG-PEG2K (50:25:20:5) are mixed and diluted with ethanol to 3 mL final |
| | volume. Separately, an aqueous buffered solution (10 mM citrate/150 mM NaCl, |
| | pH 4.5) of circRNA is prepared from a 1 mg/mL stock. The lipid solution is |
| | injected rapidly into the aqueous circRNA solution and shaken to yield a final |
| | suspension in 20% ethanol. The resulting nanoparticle suspension is filtered, |
| | diafiltrated with 1 × PBS (pH 7.4), concentrated and stored at 2-8° C. |
| 4 | Aliquots of 50 mg/mL ethanolic solutions of ICE, DOPE and DMG-PEG2K |
| | (70:25:5) are mixed and diluted with ethanol to 3 mL final volume. Separately, an |
| | aqueous buffered solution (10 mM citrate/150 mM NaCl, pH 4.5) of circRNA is |
| | prepared from a 1 mg/mL stock. The lipid solution is injected rapidly into the |
| | aqueous circRNA solution and shaken to yield a final suspension in 20% ethanol. |
| | The resulting nanoparticle suspension is filtered, diafiltrated with 1 × PBS (pH 7.4), |
| | concentrated and stored at 2-8° C. |
| 5 | Aliquots of 50 mg/mL ethanolic solutions of HGT5000, DOPE, cholesterol and |
| | DMG-PEG2K (40:20:35:5) are mixed and diluted with ethanol to 3 mL final |
| | volume. Separately, an aqueous buffered solution (10 mM citrate/150 mM NaCl, |
| | pH 4.5) of EPO circRNA is prepared from a 1 mg/mL stock. The lipid solution is |
| | injected rapidly into the aqueous circRNA solution and shaken to yield a final |
| | suspension in 20% ethanol. The resulting nanoparticle suspension is filtered, |
| | diafiltrated with 1 × PBS (pH 7.4), concentrated and stored at 2-8° C. Final |
| | concentration = 1.82 mg/mL EPO mRNA (encapsulated). Zave = 105.6 nm |
| | (Dv(50) = 53.7 nm; Dv(90) = 157 nm). |
| 6 | Aliquots of 50 mg/mL ethanolic solutions of HGT5001, DOPE, cholesterol and |
| | DMG-PEG2K (40:20:35:5) are mixed and diluted with ethanol to 3 mL final |
| | volume. Separately, an aqueous buffered solution (10 mM citrate/150 mM NaCl, |
| | pH 4.5) of EPO circRNA is prepared from a 1 mg/mL stock. The lipid solution is |
| | injected rapidly into the aqueous circRNA solution and shaken to yield a final |
| | suspension in 20% ethanol. The resulting nanoparticle suspension is filtered, |
| | diafiltrated with 1 × PBS (pH 7.4), concentrated and stored at 2-8° C. |

[1371] In some embodiments, transfer vehicle has a formulation as described in Table 31a.

TABLE 31b

| Composition (mol %) | Components |
|---|---|
| 40:20:38.5:1.5 | Compound:Phospholipid:Phytosterol*:PEG-DMG |
| 45:15:38.5:1.5 | Compound:Phospholipid:Phytosterol*:PEG-DMG |
| 50:10:38.5:1.5 | Compound:Phospholipid:Phytosterol*:PEG-DMG |
| 55:5:38.5:1.5 | Compound:Phospholipid:Phytosterol*:PEG-DMG |
| 60:5:33.5:1.5 | Compound:Phospholipid:Phytosterol*:PEG-DMG |
| 45:20:33.5:1.5 | Compound:Phospholipid:Phytosterol*:PEG-DMG |
| 50:20:28.5:1.5 | Compound:Phospholipid:Phytosterol*:PEG-DMG |
| 55:20:23.5:1.5 | Compound:Phospholipid:Phytosterol*:PEG-DMG |
| 60:20:18.5:1.5 | Compound:Phospholipid:Phytosterol*:PEG-DMG |
| 40:15:43.5:1.5 | Compound:Phospholipid:Phytosterol*:PEG-DMG |
| 50:15:33.5:1.5 | Compound:Phospholipid:Phytosterol*:PEG-DMG |
| 55:15:28.5:1.5 | Compound:Phospholipid:Phytosterol*:PEG-DMG |
| 60:15:23.5:1.5 | Compound:Phospholipid:Phytosterol*:PEG-DMG |
| 40:10:48.5:1.5 | Compound:Phospholipid:Phytosterol*:PEG-DMG |
| 45:10:43.5:1.5 | Compound:Phospholipid:Phytosterol*:PEG-DMG |
| 55:10:33.5:1.5 | Compound:Phospholipid:Phytosterol*:PEG-DMG |
| 60:10:28.5:1.5 | Compound:Phospholipid:Phytosterol*:PEG-DMG |
| 40:5:53.5:1.5 | Compound:Phospholipid:Phytosterol*:PEG-DMG |
| 45:5:48.5:1.5 | Compound:Phospholipid:Phytosterol*:PEG-DMG |
| 50:5:43.5:1.5 | Compound:Phospholipid:Phytosterol*:PEG-DMG |
| 40:20:40:0 | Compound:Phospholipid:Phytosterol*:PEG-DMG |
| 45:20:35:0 | Compound:Phospholipid:Phytosterol*:PEG-DMG |
| 50:20:30:0 | Compound:Phospholipid:Phytosterol*:PEG-DMG |
| 55:20:25:0 | Compound:Phospholipid:Phytosterol*:PEG-DMG |
| 60:20:20:0 | Compound:Phospholipid:Phytosterol*:PEG-DMG |
| 40:15:45:0 | Compound:Phospholipid:Phytosterol*:PEG-DMG |

[1372] In some embodiments, transfer vehicle has a formulation as described in Table 31b.

[1373] For nanoparticle compositions including circRNA, solutions of the circRNA at concentrations of 0.1 mg/ml in deionized water are diluted in a buffer, e.g., 50 mM sodium citrate buffer at a pH between 3 and 4 to form a stock solution. Alternatively, solutions of the circRNA at concentrations of 0.15 mg/ml in deionized water are diluted in a buffer, e.g., 6.25 mM sodium acetate buffer at a pH between 3 and 4.5 to form a stock solution.

[1374] Nanoparticle compositions including a circular RNA and a lipid component are prepared by combining the lipid solution with a solution including the circular RNA at lipid component to circRNA wt:wt ratios between about 5:1 and about 50:1. The lipid solution is rapidly injected using, e.g., a NanoAssemblr microfluidic based system at flow rates between about 10 ml/min and about 18 ml/min or between about 5 ml/min and about 18 ml/min into the circRNA solution, to produce a suspension with a water to ethanol ratio between about 1:1 and about 4:1.

[1375] Nanoparticle compositions can be processed by dialysis to remove ethanol and achieve buffer exchange. Formulations are dialyzed twice against phosphate buffered saline (PBS), pH 7.4, at volumes 200 times that of the primary product using Slide-A-Lyzer cassettes (Thermo Fisher Scientific Inc., Rockford, Ill.) with a molecular weight cutoff of 10 kDa or 20 kDa. The formulations are then dialyzed overnight at 4° C. The resulting nanoparticle suspension is filtered through 0.2 μm sterile filters (Sarstedt, Nümbrecht, Germany) into glass vials and sealed with crimp closures. Nanoparticle composition solutions of 0.01 mg/ml to 0.15 mg/ml are generally obtained.

[1376] The method described above induces nano-precipitation and particle formation.

[1377] Alternative processes including, but not limited to, T-junction and direct injection, may be used to achieve the same nano-precipitation. B. Characterization of nanoparticle compositions

[1378] A Zetasizer Nano ZS (Malvern Instruments Ltd, Malvern, Worcestershire, UK) can be used to determine the particle size, the polydispersity index (PDI) and the zeta potential of the nanoparticle compositions in 1×PBS in determining particle size and 15 mM PBS in determining zeta potential.

[1379] Ultraviolet-visible spectroscopy can be used to determine the concentration of circRNA in nanoparticle compositions. 100 μL of the diluted formulation in 1×PBS is added to 900 μL of a 4:1 (v/v) mixture of methanol and chloroform. After mixing, the absorbance spectrum of the solution is recorded, for example, between 230 nm and 330 nm on a DU 800 spectrophotometer (Beckman Coulter, Beckman Coulter, Inc., Brea, Calif.). The concentration of circRNA in the nanoparticle composition can be calculated based on the extinction coefficient of the circRNA used in the composition and on the difference between the absorbance at a wavelength of, for example, 260 nm and the baseline value at a wavelength of, for example, 330 nm.

[1380] A QUANT-IT™ RIBOGREEN® RNA assay (Invitrogen Corporation Carlsbad, Calif.) can be used to evaluate the encapsulation of circRNA by the nanoparticle composition. The samples are diluted to a concentration of approximately 5 μg/mL or 1 μg/mL in a TE buffer solution (10 mM Tris-HCl, 1 mM EDTA, pH 7.5). 50 μL of the diluted samples are transferred to a polystyrene 96 well plate and either 50 μL of TE buffer or 50 μL of a 2-4% Triton X-100 solution is added to the wells. The plate is incubated at a temperature of 37° C. for 15 minutes. The RIBOGREEN® reagent is diluted 1:100 or 1:200 in TE buffer, and 100 μL of this solution is added to each well. The fluorescence intensity can be measured using a fluorescence plate reader (Wallac Victor 1420 Multilabel Counter; Perkin Elmer, Waltham, Mass.) at an excitation wavelength of, for example, about 480 nm and an emission wavelength of, for example, about 520 nm. The fluorescence values of the reagent blank are subtracted from that of each of the samples and the percentage of free circRNA is determined by dividing the fluorescence intensity of the intact sample (without addition of Triton X-100) by the fluorescence value of the disrupted sample (caused by the addition of Triton X-100). C.

### In Vivo Formulation Studies:

[1381] In order to monitor how effectively various nanoparticle compositions deliver circRNA to targeted cells, different nanoparticle compositions including circRNA are prepared and administered to rodent populations. Mice are intravenously, intramuscularly, intraarterially, or intratumorally administered a single dose including a nanoparticle composition with a lipid nanoparticle formulation. In some instances, mice may be made to inhale doses. Dose sizes may range from 0.001 mg/kg to 10 mg/kg, where 10 mg/kg describes a dose including 10 mg of a circRNA in a nanoparticle composition for each 1 kg of body mass of the mouse. A control composition including PBS may also be employed.

[1382] Upon administration of nanoparticle compositions to mice, dose delivery profiles, dose responses, and toxicity of particular formulations and doses thereof can be measured by enzyme-linked immunosorbent assays (ELISA), bioluminescent imaging, or other methods. Time courses of protein expression can also be evaluated. Samples collected from the rodents for evaluation may include blood and tissue (for example, muscle tissue from the site of an intramuscular injection and internal tissue); sample collection may involve sacrifice of the animals.

[1383] Higher levels of protein expression induced by administration of a composition including a circRNA will be indicative of higher circRNA translation and/or nanoparticle composition circRNA delivery efficiencies. As the non-RNA components are not thought to affect translational machineries themselves, a higher level of protein expression is likely indicative of a higher efficiency of delivery of the circRNA by a given nanoparticle composition relative to other nanoparticle compositions or the absence thereof.

### Example 27

### Characterization of Nanoparticle Compositions

[1384] A Zetasizer Nano ZS (Malvern Instruments Ltd, Malvern, Worcestershire, UK) can be used to determine the particle size, the polydispersity index (PDI) and the zeta potential of the transfer vehicle compositions in 1×PBS in determining particle size and 15 mM PBS in determining zeta potential.

[1385] Ultraviolet-visible spectroscopy can be used to determine the concentration of a therapeutic and/or prophylactic (e.g., RNA) in transfer vehicle compositions. 100 μL of the diluted formulation in 1×PBS is added to 900 μL of a 4:1 (v/v) mixture of methanol and chloroform. After mixing, the absorbance spectrum of the solution is recorded, for example, between 230 nm and 330 nm on a DU 800 spectrophotometer (Beckman Coulter, Beckman Coulter, Inc., Brea, Calif.). The concentration of therapeutic and/or prophylactic in the transfer vehicle composition can be calculated based on the extinction coefficient of the therapeutic and/or prophylactic used in the composition and on the difference between the absorbance at a wavelength of, for example, 260 nm and the baseline value at a wavelength of, for example, 330 nm.

[1386] For transfer vehicle compositions including RNA, a QUANT-IT™ RIBOGREEN® RNA assay (Invitrogen Corporation Carlsbad, Calif.) can be used to evaluate the encapsulation of RNA by the transfer vehicle composition. The samples are diluted to a concentration of approximately 5 μg/mL or 1 μg/mL in a TE buffer solution (10 mM Tris-HCl, 1 mM EDTA, pH 7.5). 50 μL of the diluted samples are transferred to a polystyrene 96 well plate and either 50 μL of TE buffer or 50 μL of a 2-4% Triton X-100 solution is added to the wells. The plate is incubated at a temperature of 37° C. for 15 minutes. The RIBOGREEN® reagent is diluted 1:100 or 1:200 in TE buffer, and 100 μL of this solution is added to each well. The fluorescence intensity can be measured using a fluorescence plate reader (Wallac Victor 1420 Multilablel Counter; Perkin Elmer, Waltham, Mass.) at an excitation wavelength of, for example, about 480 nm and an emission wavelength of, for example, about 520 nm. The fluorescence values of the reagent blank are

[1387] subtracted from that of each of the samples and the percentage of free RNA is determined by dividing the fluorescence intensity of the intact sample (without addition of Triton X-100) by the fluorescence value of the disrupted sample (caused by the addition of Triton X-100).

### Example 28

### T Cell Targeting

[1388] To target transfer vehicles to T-cells, T cell antigen binders, e.g., anti-CD8 antibodies, are coupled to the surface of the transfer vehicle. Anti-T cell antigen antibodies are mildly reduced with an excess of DTT in the presence of EDTA in PBS to expose free hinge region thiols. To remove DTT, antibodies are passed through a desalting column. The heterobifunctional cross-linker SM(PEG)24 is used to anchor antibodies to the surface of circRNA-loaded transfer vehicles (Amine groups are present in the head groups of PEG lipids, free thiol groups on antibodies were created by DTT, SM(PEG)24 cross-links between amines and thiol groups). Transfer vehicles are first incubated with an excess of SM(PEG)24 and centrifuged to remove unreacted cross-linker. Activated transfer vehicles are then incubated with an excess of reduced anti-T cell antigen antibody. Unbound antibody is removed using a centrifugal filtration device.

### Example 29

### RNA Containing Transfer Vehicle Using RV88

[1389] In this example RNA containing transfer vehicles are synthesized using the 2-D vortex microfluidic chip with the cationic lipid RV88 for delivery of circRNA.

[chemical structure]

TABLE 32a

| Materials and Instrument | Vendor | Cat # |
|---|---|---|
| 1M Tris-HCl, pH 8.0, Sterile | Teknova | T1080 |
| 5M Sodium Chloride solution | Teknova | S0250 |
| QB Citrate buffer, pH 6.0 (100 mM) | Teknova | Q2446 |
| Nuclease-free water | Ambion | AM9937 |
| Triton X-100 | Sigma-Aldrich | T8787-100ML |
| RV88 | GVK bio | |
| DSPC | Lipoid | 556500 |
| Cholesterol | Sigma | C3045-5G |
| PEG2K | Avanti Polar Lipids | 880150 |
| Ethanol | Acros Organic | 615090010 |
| 5 mL Borosilicate glass vials | Thermo Scientific | ST5-20 |
| PD MiniTrap G-25 Desalting | GE Healthcare | VWR Cat. |
| Columns | | #95055-984 |
| Quant-IT RiboGreen RNA Assay | Molecular Probes/ | R11490 |
| kit | Life Technologies | |
| Black 96-well microplates | Greiner | 655900 |

[1390] RV88, DSPC, and cholesterol all being prepared in ethanol at a concentration of 10 mg/ml in borosilica vials. The lipid 14:0-PEG2K PE is prepared at a concentration of 4 mg/ml also in a borosilica glass vial. Dissolution of lipids at stock concentrations is attained by sonication of the lipids in ethanol for 2 min. The solutions are then heated on an orbital tilting shaker set at 170 rpm at 37° C. for 10 min. Vials are then equilibrated at 26° C. for a minimum of 45 min. The lipids are then mixed by adding volumes of stock lipid as shown in Table 32b. The solution is then adjusted with ethanol such that the final lipid concentration was 7.92 mg/ml.

TABLE 32b

| | | | | | Stock | | Ethanol |
|---|---|---|---|---|---|---|---|
| Composition | MW | % | nmoles | mg | (mg/ml) | ul | (ul) |
| RV88 | 794.2 | 40% | 7200 | 5.72 | 10 | 571.8 | 155.3 |
| DSPC | 790.15 | 10% | 1800 | 1.42 | 10 | 142.2 | |
| Cholesterol | 386.67 | 48% | 8640 | 3.34 | 10 | 334.1 | |
| PEG2K | 2693.3 | 2% | 380 | 0.97 | 4 | 242.4 | |

[1391] RNA is prepared as a stock solution with 75 mM Citrate buffer at pH 6.0 and a concentration of RNA at 1.250 mg/ml. The concentration of the RNA is then adjusted to 0.1037 mg/ml with 75 mM citrate buffer at pH 6.0, equilibrated to 26° C. The solution is then incubated at 26° C. for a minimum of 25 min.

[1392] The microfluidic chamber is cleaned with ethanol and neMYSIS syringe pumps are prepared by loading a syringe with the RNA solution and another syringe with the ethanolic lipid. Both syringes are loaded and under the control of neMESYS software. The solutions are then applied to the mixing chip at an aqueous to organic phase ratio of 2 and a total flow rate of 22 ml/min (14.67 ml/min for RNA and 7.33 ml/min for the lipid solution. Both pumps are started synchronously. The mixer solution that flowed from the microfluidic chip is collected in 4×1 ml fractions with the first fraction being discarded as waste. The remaining solution containing the RNA-liposomes is exchanged by using G-25 mini desalting columns to 10 mM Tris-HCl, 1 mM EDTA, at pH 7.5. Following buffer exchange, the materials are characterized for size, and RNA entrapment through DLS analysis and Ribogreen assays, respectively.

### Example 30

### RNA Containing Transfer Vehicle Using RV94

[1393] In this example, RNA containing liposome are synthesized using the 2-D vortex microfluidic chip with the cationic lipid RV94 for delivery of circRNA.

[chemical structure]

TABLE 33

| Materials and Instrument | Vendor | Cat # |
|---|---|---|
| 1M Tris-HCl, pH 8.0, Sterile | Teknova | T1080 |
| 5M Sodium Chloride solution | Teknova | S0250 |
| QB Citrate buffer, pH 6.0 (100 mM) | Teknova | Q2446 |
| Nuclease-free water | Ambion | AM9937 |
| Triton X-100 | Sigma-Aldrich | T8787-100ML |
| RV94 | GVK bio | |
| DSPC | Lipoid | 556500 |
| Cholesterol | Sigma | C3045-5G |
| PEG2K | Avanti Polar Lipids | 880150 |
| Ethanol | Acros Organic | 615090010 |
| 5 mL Borosilicate glass vials | Thermo Scientific | ST5-20 |
| PD MiniTrap G-25 Desalting | GE Healthcare | VWR Cat. |
| Columns | | #95055-984 |
| Quant-IT RiboGreen RNA Assay | Molecular Probes/ | R11490 |
| kit | Life Technologies | |
| Black 96-well microplates | Greiner | 655900 |

[1394] The lipids were prepared as in Example 29 using the material amounts named in Table 34 to a final lipid concentration of 7.92 mg/ml.

TABLE 34

| | | | | | Stock | | Ethanol |
|---|---|---|---|---|---|---|---|
| Composition | MW | % | nmoles | mg | (mg/ml) | ul | (ul) |
| RV94 | 808.22 | 40% | 2880 | 2.33 | 10 | 232.8 | 155.3 |
| DSPC | 790.15 | 10% | 720 | 0.57 | 10 | 56.9 | |
| Cholesterol | 386.67 | 48% | 3456 | 1.34 | 10 | 133.6 | |
| PEG2K | 2693.3 | 2% | 144 | 0.39 | 4 | 97.0 | |

[1395] The aqueous solution of circRNA is prepared as a stock solution with 75 mM Citrate buffer at pH 6.0 the circRNA at 1.250 mg/ml. The concentration of the RNA is then adjusted to 0.1037 mg/ml with 75 mM citrate buffer at pH 6.0, equilibrated to 26° C. The solution is then incubated at 26° C. for a minimum of 25 min.

[1396] The microfluidic chamber is cleaned with ethanol and neMYSIS syringe pumps are prepared by loading a syringe with the RNA solution and another syringe with the ethanolic lipid. Both syringes are loaded and under the control of neMESYS software. The solutions are then applied to the mixing chip at an aqueous to organic phase ratio of 2 and a total flow rate of 22 ml/min (14.67 ml/min for RNA and 7.33 ml/min for the lipid solution. Both pumps are started synchronously. The mixer solution that flowed from the microfluidic chip is collected in 4×1 ml fractions with the first fraction being discarded as waste. The remaining solution containing the circRNA-transfer vehicles is exchanged by using G-25 mini desalting columns to 10 mM Tris-HCl, 1 mM EDTA, at pH 7.5, as described above. Following buffer exchange, the materials are characterized for size, and RNA entrapment through DLS analysis and Ribogreen assays, respectively. The biophysical analysis of the liposomes is shown in Table 35.

TABLE 35

| | | | Ratio | RNA | RNA | | |
|---|---|---|---|---|---|---|---|
| | | | (aqueous/ | encapsulatiom | encapsulatiom | | |
| Sample | NP | TFR | org | amount | yield | size | |
| Name | Ratio | ml/min | phase) | (μg/ml) | % | d · nm | PDI |
| SAM-RV94 | 8 | 22 | 2 | 31.46 | 86.9 | 113.1 | 0.12 |

### Example 31

### General Protocol for in Line Mixing

[1397] Individual and separate stock solutions are prepared—one containing lipid and the other circRNA. Lipid stock containing a desired lipid or lipid mixture, DSPC, cholesterol and PEG lipid is prepared by solubilized in 90% ethanol. The remaining 10% is low pH citrate buffer. The concentration of the lipid stock is 4 mg/mL. The pH of this citrate buffer can range between pH 3 and pH 5, depending on the type of lipid employed. The circRNA is also solubilized in citrate buffer at a concentration of 4 mg/mL. 5 mL of each stock solution is prepared.

[1398] Stock solutions are completely clear and lipids are ensured to be completely solubilized before combining with circRNA. Stock solutions may be heated to completely solubilize the lipids. The circRNAs used in the process may be unmodified or modified oligonucleotides and may be conjugated with lipophilic moieties such as cholesterol.

[1399] The individual stocks are combined by pumping each solution to a T-junction. A dual-head Watson-Marlow pump was used to simultaneously control the start and stop of the two streams. A 1.6 mm polypropylene tubing is further downsized to 0.8 mm tubing in order to increase the linear flow rate. The polypropylene line (ID=0.8 mm) are attached to either side of a T-junction. The polypropylene T has a linear edge of 1.6 mm for a resultant volume of 4.1 mm³. Each of the large ends (1.6 mm) of polypropylene line is placed into test tubes containing either solubilized lipid stock or solubilized circRNA. After the T-junction, a single tubing is placed where the combined stream exited. The tubing is then extended into a container with 2× volume of PBS, which is rapidly stirred. The flow rate for the pump is at a setting of 300 rpm or 110 mL/min. Ethanol is removed and exchanged for PBS by dialysis. The lipid formulations are then concentrated using centrifugation or diafiltration to an appropriate working concentration.

[1400] C57BL/6 mice (Charles River Labs, MA) receive either saline or formulated circRNA via tail vein injection. At various time points after administration, serum samples are collected by retroorbital bleed. Serum levels of Factor VII protein are determined in samples using a chromogenic assay (Biophen FVTI, Aniara Corporation, OH). To determine liver RNA levels of Factor VII, animals are sacrificed and livers are harvested and snap frozen in liquid nitrogen. Tissue lysates are prepared from the frozen tissues and liver RNA levels of Factor VII are quantified using a branched DNA assay (QuantiGene Assay, Panomics, CA).

[1401] FVII activity is evaluated in FVTI siRNA-treated animals at 48 hours after intravenous (bolus) injection in C57BL/6 mice. FVII is measured using a commercially available kit for determining protein levels in serum or tissue, following the manufacturer's instructions at a microplate scale. FVII reduction is determined against untreated control mice, and the results are expressed as % Residual FVII. Two dose levels (0.05 and 0.005 mg/kg FVII siRNA) are used in the screen of each novel liposome composition.

### Example 32

### circRNA Formulation Using Preformed Vesicles

[1402] Cationic lipid containing transfer vehicles are made using the preformed vesicle method. Cationic lipid, DSPC, cholesterol and PEG-lipid are solubilized in ethanol at a molar ratio of 40/10/40/10, respectively. The lipid mixture is added to an aqueous buffer (50 mM citrate, pH 4) with mixing to a final ethanol and lipid concentration of 30% (vol/vol) and 6.1 mg/mL respectively and allowed to equilibrate at room temperature for 2 min before extrusion. The hydrated lipids are extruded through two stacked 80 nm pore-sized filters (Nuclepore) at 22° C. using a Lipex Extruder (Northern Lipids, Vancouver, BC) until a vesicle diameter of 70-90 nm, as determined by Nicomp analysis, is obtained. For cationic lipid mixtures which do not form small vesicles, hydrating the lipid mixture with a lower pH buffer (50 mM citrate, pH 3) to protonate the phosphate group on the DSPC headgroup helps form stable 70-90 nm vesicles.

[1403] The FVII circRNA (solubilised in a 50 mM citrate, pH 4 aqueous solution containing 30% ethanol) is added to the vesicles, pre-equilibrated to 35° C., at a rate of −5 mL/min with mixing. After a final target circRNA/lipid ratio of 0.06 (wt wt) is achieved, the mixture is incubated for a further 30 min at 35° C. to allow vesicle re-organization and encapsulation of the FVII RNA. The ethanol is then removed and the external buffer replaced with PBS (155 mM NaCl, 3 mM Na2HP04, ImM KH2P04, pH 7.5) by either dialysis or tangential flow diafiltration. The final encapsulated circRNA-to-lipid ratio is determined after removal of unencapsulated RNA using size-exclusion spin columns or ion exchange spin columns.

### Example 33

### Expression of Trispecific Antigen Binding Proteins from Engineered Circular RNA

[1404] Circular RNAs are designed to include: (1) a 3′ post splicing group I intron fragment; (2) an Internal Ribosome Entry Site (IRES); (3) a trispecific antigen-binding protein coding region; and (4) a 3′ homology region. The trispecific antigen-binding protein regions are constructed to produce an exemplary trispecific antigen-binding protein that will bind to a target antigen, e.g., GPC3.

Generation of a scFv CD3 Binding Domain

[1405] The human CD3epsilon chain canonical sequence is Uniprot Accession No. P07766. The human CD3gamma chain canonical sequence is Uniprot Accession No. P09693. The human CD3delta chain canonical sequence is Uniprot Accession No. P043234. Antibodies against CD3epsilon, CD3gamma or CD3delta are generated via known technologies such as affinity maturation. Where murine anti-CD3 antibodies are used as a starting material, humanization of murine anti-CD3 antibodies is desired for the clinical setting, where the mouse-specific residues may induce a human-anti-mouse antigen (HAMA) response in subjects who receive treatment of a trispecific antigen-binding protein described herein. Humanization is accomplished by grafting CDR regions from murine anti-CD3 antibody onto appropriate human germline acceptor frameworks, optionally including other modifications to CDR and/or framework regions.

[1406] Human or humanized anti-CD3 antibodies are therefore used to generate scFv sequences for CD3 binding domains of a trispecific antigen-binding protein. DNA sequences coding for human or humanized VL and VH domains are obtained, and the codons for the constructs are, optionally, optimized for expression in cells from Homo sapiens. The order in which the VL and VH domains appear in the scFv is varied (i.e. VL-VH, or VH-VL orientation), and three copies of the “G4S” or “G₄S” subunit (G₄S)₃ connect the variable domains to create the scFv domain. Anti-CD3 scFv plasmid constructs can have optional Flag, His or other affinity tags, and are electroporated into HEK293 or other suitable human or mammalian cell lines and purified. Validation assays include binding analysis by FACS, kinetic analysis using Proteon, and staining of CD3-expressing cells.

Generation of a scFv Glypican-3 (GPC3) Binding Domain

[1407] Glypican-3 (GPC3) is one of the cell surface proteins present on Hepatocellular Carcinoma but not on healthy normal liver tissue. It is frequently observed to be elevated in hepatocellular carcinoma and is associated with poor prognosis for HCC patients. It is known to activate Wnt signalling. GPC3 antibodies have been generated including MDX-1414, HN3, GC33, and YP7.

[1408] A scFv binding to GPC-3 or another target antigen is generated similarly to the above method for generation of a scFv binding domain to CD3.

### Expression of Trispecific Antigen-Binding Proteins In Vitro

[1409] A CHO cell expression system (FIp-In®, Life Technologies), a derivative of CHO-Kl Chinese Hamster ovary cells (ATCC, CCL-61) (Kao and Puck, Proc. Natl. Acad Sci USA 1968; 60(4):1275-81), is used. Adherent cells are subcultured according to standard cell culture protocols provided by Life Technologies.

[1410] For adaption to growth in suspension, cells are detached from tissue culture flasks and placed in serum-free medium. Suspension-adapted cells are cryopreserved in medium with 10% DMSO.

[1411] Recombinant CHO cell lines stably expressing secreted trispecific antigen-binding proteins are generated by transfection of suspension-adapted cells. During selection with the antibiotic Hygromycin B viable cell densities are measured twice a week, and cells are centrifuged and resuspended in fresh selection medium at a maximal density of 0.1×10⁶ viable cells/mL. Cell pools stably expressing trispecific antigen-binding proteins are recovered after 2-3 weeks of selection at which point cells are transferred to standard culture medium in shake flasks. Expression of recombinant secreted proteins is confirmed by performing protein gel electrophoresis or flow cytometry. Stable cell pools are cryopreserved in DMSO containing medium.

[1412] Trispecific antigen-binding proteins are produced in 10-day fed-batch cultures of stably transfected CHO cell lines by secretion into the cell culture supernatant. Cell culture supernatants are harvested after 10 days at culture viabilities of typically >75%. Samples are collected from the production cultures every other day and cell density and viability are assessed. On day of harvest, cell culture supernatants are cleared by centrifugation and vacuum filtration before further use.

[1413] Protein expression titers and product integrity in cell culture supernatants are analyzed by SDS-PAGE.

### Purification of Trispecific Antigen-Binding Proteins

[1414] Trispecific antigen-binding proteins are purified from CHO cell culture supernatants in a two-step procedure. The constructs are subjected to affinity chromatography in a first step followed by preparative size exclusion chromatography (SEC) on Superdex 200 in a second step. Samples are buffer-exchanged and concentrated by ultrafiltration to a typical concentration of >1 mg/mL Purity and homogeneity (typically >90%) of final samples are assessed by SDS PAGE under reducing and non-reducing conditions, followed by immunoblotting using an anti-(half-life extension domain) or anti idiotype antibody as well as by analytical SEC, respectively. Purified proteins are stored at aliquots at −80° C. until use.

### Example 34

### Expression of Engineered Circular RNA with a Half-Life Extension Domain has Improved Pharmacokinetic Parameters than without a Half-Life Extension Domain

[1415] The trispecific antigen-binding protein encoded on a circRNA molecule of example 23 is administered to cynomolgus monkeys as a 0.5 mg/kg bolus injection intramuscularly. Another cynomolgus monkey group receives a comparable protein encoded on a circRNA molecule in size with binding domains to CD3 and GPC-3, but lacking a half-life extension domain. A third and fourth group receive a protein encoded on a circRNA molecule with CD3 and half-life extension domain binding domains and a protein with GPC-3 and half-life extension domains, respectively. Both proteins encoded by circRNA are comparable in size to the trispecific antigen-binding protein. Each test group consists of 5 monkeys. Serum samples are taken at indicated time points, serially diluted, and the concentration of the proteins is determined using a binding ELISA to CD3 and/or GPC-3.

[1416] Pharmacokinetic analysis is performed using the test article plasma concentrations. Group mean plasma data for each test article conforms to a multi-exponential profile when plotted against the time post-dosing. The data are fit by a standard two-compartment model with bolus input and first-order rate constants for distribution and elimination phases. The general equation for the best fit of the data for i.v. administration is: c(t)=Ae^{-at}+Be^{-pt}, where c(t) is the plasma concentration at time t, A and B are intercepts on the Y-axis, and a and β are the apparent first-order rate constants for the distribution and elimination phases, respectively. The a-phase is the initial phase of the clearance and reflects distribution of the protein into all extracellular fluid of the animal, whereas the second or β-phase portion of the decay curve represents true plasma clearance. Methods for fitting such equations are well known in the art. For example, A=D/V(a−k21)/(a−p), B=D/V(p−k21)/(a−p), and a and β (for α>β) are roots of the quadratic equation: r²+(k12+k21+k10)r+k21k10=0 using estimated parameters of V=volume of distribution, k10=elimination rate, k12=transfer rate from compartment 1 to compartment 2 and k21=transfer rate from compartment 2 to compartment 1, and D=the administered dose.

[1417] Data analysis: Graphs of concentration versus time profiles are made using KaleidaGraph (KaleidaGraph™ V. 3.09 Copyright 1986-1997. Synergy Software. Reading, Pa.). Values reported as less than reportable (LTR) are not included in the PK analysis and are not represented graphically. Pharmacokinetic parameters are determined by compartmental analysis using WinNonlin software (WinNonlin® Professional V. 3.1 WinNonlin™ Copyright 1998-1999. Pharsight Corporation. Mountain View, Calif.). Pharmacokinetic parameters are computed as described in Ritschel W A and Kearns G L, 1999, EST: Handbook Of Basic Pharmacokinetics Including Clinical Applications, 5th edition, American Pharmaceutical Assoc., Washington, D C.

[1418] It is expected that the trispecific antigen-binding protein encoded on a circRNA molecule of Example 23 has improved pharmacokinetic parameters such as an increase in elimination half-time as compared to proteins lacking a half-life extension domain.

### Example 35

### Cytotoxicity of the Trispecific Antigen-Binding Protein

[1419] The trispecific antigen-binding protein encoded on a circRNA molecule of Example 23 is evaluated in vitro on its mediation of T cell dependent cytotoxicity to GPC-3+ target cells.

[1420] Fluorescence labeled GPC3 target cells are incubated with isolated PBMC of random donors or T-cells as effector cells in the presence of the trispecific antigen-binding protein of Example 23. After incubation for 4 h at 37° C. in a humidified incubator, the release of the fluorescent dye from the target cells into the supernatant is determined in a spectrofluorimeter. Target cells incubated without the trispecific antigen-binding protein of Example 23 and target cells totally lysed by the addition of saponin at the end of the incubation serve as negative and positive controls, respectively.

[1421] Based on the measured remaining living target cells, the percentage of specific cell lysis is calculated according to the following formula: [1-(number of living targets(sample)/number of living targets(spontaneous))]×100%. Sigmoidal dose response curves and EC50 values are calculated by non-linear regression/4-parameter logistic fit using the GraphPad Software. The lysis values obtained for a given antibody concentration are used to calculate sigmoidal dose-response curves by 4 parameter logistic fit analysis using the Prism software.

### Example 36

### Synthesis of Ionizable Lipids

### 38.1 Synthesis of ((3-(2-methyl-1H-imidazol-1-yl)propyl)azanediyl)bis(hexane-6,1-diyl) bis(2-hexyldecanoate) (Lipid 27, Table 10a) and ((3-(1H-imidazol-1-yl)propyl)azanediyl)bis(hexane-6,1-diyl) bis(2-hexyldecanoate)) (Lipid 26, Table 10a)

[1422] In a 100 mL round bottom flask connected with condenser, 3-(1H-imidazol-1-yl)propan-1-amine (100 mg, 0.799 mmol) or 3-(2-methyl-1H-imidazol-1-yl)propan-1-amine (0.799 mmol), 6-bromohexyl 2-hexyldecanoate (737.2 mg, 1.757 mmol), potassium carbonate (485 mg, 3.515 mmol) and potassium iodide (13 mg, 0.08 mmol) were mixed in acetonitrile (30 mL), and the reaction mixture was heated to 80° C. for 48 h. The mixture was cooled to room temperature and was filtered through a pad of Celite. The filtrate was diluted with ethyl acetate. After washing with water, brine and dried over anhydrous sodium sulfate. The solvent was evaporated and the crude residue was purified by flash chromatography (SiO₂:CH₂Cl₂=100% to 10% of methanol in CH₂Cl₂) and colorless oil product was obtained (92 mg, 15%). Molecular formula of ((3-(1H-imidazol-1-yl)propyl)azanediyl)bis(hexane-6,1-diyl) bis(2-hexyldecanoate)) is C₅₀H₉₅N₃O₄ and molecular weight (Mw) is 801.7.

### Reaction scheme for synthesis of ((3-(1H-imidazol-1-yl)propyl)azanediyl)bis(hexane-6,1-diyl) bis(2-hexyldecanoate)) (Lipid 26, Table 10a)

[chemical structure]

[1424] Characterization of Lipid 26 was performed by LC-MS. FIG. 27A-C shows characterization of Lipid 26. FIG. 27A shows the proton NMR observed for Lipid 26. FIG. 27B is a representative LC/MS trace for Lipid 26 with total ion and UV chromatograms shown.

### 38.2 Synthesis of Lipid 22-514

### 38.2.1 Synthesis of 2-(tetradecylthio)ethan-1-ol

[1425] To a mixture of 2-sulfanylethanol (5.40 g, 69.11 mmol, 4.82 mL, 0.871 eq) in acetonitrile (200 mL) was added 1-Bromotetradecane(22 g, 79.34 mmol, 23.66 mL, 1 eq) and potassium carbonate (17.55 g, 126.95 mmol, 1.6 eq) at 25° C. The reaction mixture was warmed to 40° C. and stirred for 12 hr. TLC (ethyl acetate/petroleum ether=25/1, R_{f}=0.3, stained by I₂) showed the starting material was consumed completely and a new main spot was generated. The reaction mixture was filtered and the filter cake was washed with acetonitrile (50 mL) and then the filtrate was concentrated under vacuum to get a residue which was purified by column on silica gel (ethyl acetate/petroleum ether=1/100 to 1/25) to afford 2-(tetradecylthio)ethan-1-ol (14 g, yield 64.28%) as a white solid.

[1426] ¹H NMR (ET36387-45-P1A, 400 MHz, CHLOROFORM-d) δ 0.87-0.91 (m, 3H) 1.27 (s, 20H) 1.35-1.43 (m, 2H) 1.53-1.64 (m, 2H) 2.16 (br s, 1H) 2.49-2.56 (m, 2H) 2.74 (t, J=5.93 Hz, 2H) 3.72 (br d, J=4.89 Hz, 2H). FIG. 28 shows corresponding Nuclear Magnetic Resonance (NMR) spectrum.

### 38.2.2 Synthesis of 2-(tetradecylthio)ethyl acrylate

[1427] To a solution of 2-(tetradecylthio)ethan-1-ol (14 g, 51.00 mmol, 1 eq) in dichloromethane (240 mL) was added triethylamine (7.74 g, 76.50 mmol, 10.65 mL, 1.5 eq) and prop-2-enoyl chloride (5.54 g, 61.20 mmol, 4.99 mL, 1.2 eq) dropwise at 0° C. under nitrogen. The reaction mixture was warmed to 25° C. and stirred for 12 hr. TLC (ethyl acetate/petroleum ether=25/1, Rf=0.5, stained by I₂) showed the starting material was consumed completely and a new main spot was generated. The reaction solution was concentrated under vacuum to get crude which was purified by column on silica gel (ethyl acetate/petroleum ether=1/100 to 1/25) to afford 2-(tetradecylthio)ethyl acrylate (12 g, yield 71.61%) as a colorless oil.

[1428] ¹H NMR (ET36387-49-P1A, 400 MHz, CHLOROFORM-d) δ 0.85-0.93 (m, 3H) 1.26 (s, 19H) 1.35-1.43 (m, 2H) 1.53-1.65 (m, 2H) 2.53-2.62 (m, 2H) 2.79 (t, J=7.03 Hz, 2H) 4.32 (t, J=7.03 Hz, 2H) 5.86 (dd, J=10.39, 1.47 Hz, 1H) 6.09-6.19 (m, 1H) 6.43 (dd, J=17.30, 1.41 Hz, 1H). FIG. 29 shows corresponding Nuclear Magnetic Resonance (NMR) spectrum.

### 38.2.3 Synthesis of bis(2-(tetradecylthio)ethyl) 3,3′-((3-(2-methyl-1H-imidazol-1-yl)propyl)azanediyl)dipropionate (Lipid 22-S14)

[1429] A flask was charged with 3-(2-methyl-1H-imidazol-1-yl)propan-1-amine (300 mg, 2.16 mmol) and 2-(tetradecylthio)ethyl acrylate (1.70 g, 5.17 mmol). The neat reaction mixture was heated to 80° C. and stirred for 48 hr. TLC (ethyl acetate, R_{f}=0.3, stained by I₂, one drop ammonium hydroxide added) showed the starting material was consumed completely and a new main spot was formed. The reaction mixture was diluted with dichloromethane (4 mL) and purified by column on silica gel (petroleum ether/ethyl acetate=3/1 to 0/1, 0.1% ammonium hydroxide added) to get bis(2-(tetradecylthio)ethyl) 3,3′-((3-(2-methyl-1H-imidazol-1-yl)propyl)azanediyl)dipropionate (501 mg, yield 29.1%) as colorless oil.

[1430] ¹H NMR (ET36387-51-P1A, 400 MHz, CHLOROFORM-d) δ 0.87 (t, J=6.73 Hz, 6H) 1.25 (s, 40H) 1.33-1.40 (m, 4H) 1.52-1.61 (m, 4H) 1.81-1.90 (m, 2H) 2.36 (s, 3H) 2.39-2.46 (m, 6H) 2.53 (t, J=7.39 Hz, 4H) 2.70-2.78 (m, 8H) 3.84 (t, J=7.17 Hz, 2H) 4.21 (t, J=6.95 Hz, 4H) 6.85 (s, 1H) 6.89 (s, 1H). FIG. 30 shows corresponding Nuclear Magnetic Resonance (NMR) spectrum.

### 38.3 Synthesis of bis(2-(tetradecylthio)ethyl) 3,3′-((3-(1H-imidazol-1-yl)propyl)azanediyl)dipropionate (Lipid 93-S14)

[1431] A flask was charged with 3-(1H-imidazol-1-yl)propan-1-amine (300 mg, 2.40 mmol, 1 eq) and 2-(tetradecylthio)ethyl acrylate (1.89 g, 5.75 mmol, 2.4 eq). The neat reaction mixture was heated to 80° C. and stirred for 48 hr. TLC (ethyl acetate, R_{f}=0.3, stained by I₂, one drop ammonium hydroxide added) showed the starting material was consumed completely and a new main spot was formed. The reaction mixture was diluted with dichloromethane (4 mL) and purified by column on silica gel (petroleum ether/ethyl acetate=1/20-0/100, 0.1% ammonium hydroxide added) to get bis(2-(tetradecylthio)ethyl) 3,3′-((3-(1H-imidazol-1-yl)propyl)azanediyl)dipropionate (512 mg, yield 27.22%) as colorless oil.

[1432] ¹H NMR (ET36387-54-P1A, 400 MHz, CHLOROFORM-d) δ 0.89 (t, J=6.84 Hz, 6H) 1.26 (s, 40H) 1.34-1.41 (m, 4H) 1.58 (br t, J=7.50 Hz, 4H) 1.92 (t, J=6.62 Hz, 2H) 2.36-2.46 (m, 6H) 2.55 (t, J=7.50 Hz, 4H) 2.75 (q, J=6.84 Hz, 8H) 3.97 (t, J=6.95 Hz, 2H) 4.23 (t, J=6.95 Hz, 4H) 6.95 (s, 1H) 7.06 (s, 1H) 7.51 (s, 1H). FIG. 31 shows corresponding Nuclear Magnetic Resonance (NMR) spectrum.

### 38.4 Synthesis of heptadecan-9-yl 8-((3-(2-methyl-1H-imidazol-1-yl)propyl)(8-(nonyloxy)-8-oxooctyl)amino)octanoate (Lipid 54, Table 10a)

### 38.4.1 Synthesis of nonyl 8-bromooctanoate (3)

[chemical structure]

[1434] To a mixture of 8-bromooctanoic acid (2) (18.6 g, 83.18 mmol) and nonan-1-ol (1) (10 g, 69.32 mmol) in CH₂Cl₂ (500 mL) was added DMAP (1.7 g, 13.86 mmol), DIPEA (48 mL, 277.3 mmol) and EDC (16 g, 83.18 mmol). The reaction was stirred at room temperature overnight. After concentration of the reaction mixture, the crude residue was dissolved in ethyl acetate (500 mL), washed with IN HCl, sat. NaHCO₃, water and Brine. The organic layer was dried over anhydrous Na₂SO₄. The solvent was evaporated and the crude residue was purified by flash chromatography (SiO₂: Hexane=100% to 30% of EtOAc in Hexane) and colorless oil product 3 was obtained (9 g, 37%).

### 38.4.2 Synthesis of heptadecan-9-yl 8-bromooctanoate (5)

[chemical structure]

[1436] To a mixture of 8-bromooctanoic acid (2) (10 g, 44.82 mmol) and heptadecan-9-ol (4) (9.6 g, 37.35 mmol) in CH₂Cl₂ (300 mL) was added DMAP (900 mg, 7.48 mmol), DIPEA (26 mL, 149.7 mmol) and EDC (10.7 g, 56.03 mmol). The reaction was stirred at room temperature overnight. After concentration of the reaction mixture, the crude residue was dissolved in ethyl acetate (300 mL), washed with 1N HCl, sat. NaHCO₃, water and Brine. The organic layer was dried over anhydrous Na₂SO₄. The solvent was evaporated and the crude residue was purified by flash chromatography (SiO₂: Hexane=100% to 30% of EtOAc in Hexane) and colorless oil product 5 was obtained (5 g, 29%).

### 38.4.3 Synthesis of heptadecan-9-yl 8-((3-(2-methyl-1H-imidazol-1-yl)propyl)amino)octanoate (7)

[chemical structure]

[1438] In a 100 mL round bottom flask connected with condenser, heptadecan-9-yl 8-bromooctanoate (5) (860 mg, 1.868 mmol) and 3-(2-methyl-1H-imidazol-1-yl)propan-1-amine (6) (1.3 g, 9.339 mmol) were mixed in ethanol (10 mL). The reaction mixture was heated to reflux overnight. MS (APCI) showed the expected product. The mixture was cooled to room temperature and concentrated. The crude residue was purified by flash chromatography (SiO₂: CH₂Cl₂₌₁₀₀% to 10% of methanol+1% NH₄OH in CH₂Cl₂) and colorless oil product 7 was obtained (665 mg, 69%).

### 38.4.4 Synthesis of heptadecan-9-yl 8-((3-(2-methyl-1H-imidazol-1-yl)propyl)(8-(nonyloxy)-8-oxooctyl)amino)octanoate (Lipid 54, Table 10a)

[chemical structure]

[1440] In a 100 mL round bottom flask connected with condenser, heptadecan-9-yl 8-((3-(2-methyl-1H-imidazol-1-yl)propyl)amino)octanoate (7) (665 mg, 1.279 mmol) and nonyl 8-bromooctanoate (3) (536 mg, 1.535 mmol) were mixed in ethanol (10 mL), then DIPEA (0.55 mL, 3.198 mmol) was added. The reaction mixture was heated to reflux overnight. Both MS (APCI) and TLC (10% MeOH+1% NH₄OH in CH₂Cl₂) showed the product and some unreacted starting material. The mixture was cooled to room temperature and concentrated. The crude residue was purified by flash chromatography (SiO₂: CH₂Cl₂₌₁₀₀% to 10% of methanol+1% NH₄OH in CH₂Cl₂) and colorless oil was obtained (170 mg, 17%).

### 38.5 Synthesis of heptadecan-9-yl 8-((3-(1H-imidazol-1-yl)propyl)(8-(nonyloxy)-8-oxooctyl)amino)octanoate (Lipid 53, Table 10a)

[chemical structure]

[1442] Lipid 53 from Table 10a is synthesized according to the scheme above. Reaction conditions are identical to Lipid 54 with the exception of 3-(1H-imidazol-1-yl)propan-1-amine as the imidazole amine.

### Example 37

### Lipid Nanoparticle Formulation with Circular RNA

[1443] Lipid Nanoparticles (LNPs) were formed using a Precision Nanosystems Ignite instrument with a ‘NextGen’ mixing chamber. Ethanol phase contained ionizable Lipid 26 from Table 10a, DSPC, Cholesterol, and DSPE-PEG 2000 (Avanti Polar Lipids Inc.) at a weight ratio of 16:1:4:1 or 62:4:33:1 molar ratio was combined with an aqueous phase containing circular RNA and 25 mM sodium acetate buffer at pH 5.2. A 3:1 aqueous to ethanol mixing ratio was used. The formulated LNP then were dialyzed in 1 L of water and exchanged 2 times over 18 hours. Dialyzed LNPs were filtered using 0.2 μm filter. Prior to in vivo dosing, LNPs were diluted in PBS. LNP sizes were determined by dynamic light scattering. A cuvette with 1 mL of 20 μg/mL LNPs in PBS (pH 7.4) was measured for Z-average using the Malvern Panalytical Zetasizer Pro. The Z-average and polydispersity index were recorded.

### 39.1 Formulation of Lipids 26 and 27 from Table 10a

[1444] Lipid Nanoparticles (LNPs) were formed using a Precision Nanosystems Ignite instrument with a ‘NextGen’ mixing chamber. Ethanol phase contained ionizable Lipid 26 or Lipid 27 from Table 10a, DOPE, Cholesterol, and DSPE-PEG 2000 (Avanti Polar Lipids Inc.) at a weight ratio of 16:1:4:1 or 62:4:33:1 molar ratio was combined with an aqueous phase containing circular RNA and 25 mM sodium acetate buffer at pH 5.2. A 3:1 aqueous to ethanol mixing ratio was used. The formulated LNPs were then dialyzed in 1 L of water and exchanged 2 times over 18 hours. Dialyzed LNPs were filtered using 0.2 μm filter. Prior to in vivo dosing, LNPs were diluted in PBS. LNP sizes were determined by dynamic light scattering. A cuvette with 1 mL of 20 μg/mL LNPs in PBS (pH 7.4) was measured for Z-average using the Malvern Panalytical Zetasizer Pro. The Z-average and polydispersity index were recorded.

### 39.2 Formulation of Lipids 53 and 54 from Table 10a

[1445] Lipid Nanoparticles (LNPs) were formed using a Precision Nanosystems Ignite instrument with a ‘NextGen’ mixing chamber. Ethanol phase contained ionizable Lipid 53 or 54 of Table 10a, DOPE, Cholesterol, and DSPE-PEG 2000 (Avanti Polar Lipids Inc.) at a molar ratio of 50:10:38.5:1.5 was combined with an aqueous phase containing circular RNA and 25 mM sodium acetate buffer at pH 5.2. A 3:1 aqueous to ethanol mixing ratio was used. The formulated LNPs were then dialyzed in 1 L of 1×PBS and exchanged 2 times over 18 hours. Dialyzed LNPs were filtered using 0.2 μm filter. Prior to in vivo dosing, LNPs were diluted in PBS. LNP sizes were determined by dynamic light scattering. A cuvette with 1 mL of 20 μg/mL LNPs in PBS (pH 7.4) was measured for Z-average using the Malvern Panalytical Zetasizer Pro. The Z-average and polydispersity index were recorded.

[1446] LNP zeta potential was measured using the Malvern Panalytical Zetasizer Pro. A mixture containing 200 μL of the particle solution in water and 800 μL of distilled RNAse-free water with a final particle concentration of 400 μg/mL was loaded into a zetasizer capillary cell for analysis.

[1447] RNA encapsulation was determined using a Ribogreen assay. Nanoparticle solutions were diluted in tris-ethylenediaminetetraacetic acid (TE) buffer at a theoretical oRNA concentration of 2 μg/mL. Standard oRNA solutions diluted in TE buffer were made ranging from 2 μg/mL to 0.125 μg/mL. The particles and standards were added to all wells and a second incubation was performed (37° C. at 350 rpm for 3 minutes). Fluorescence was measured using a SPECTRAmax® GEMINI XS microplate spectrofluorometer. The concentration of circular RNA in each particle solution was calculated using the standard curve. The encapsulation efficiency was calculated from the ratio of oRNA detected between lysed and unlysed particles.

TABLE 36a
Characterization of LNPs

| | | | Encapsulation | Zeta Data |
|---|---|---|---|---|
| Ionizable Lipid | Size (nm) | PDI | Efficiency (%) | Potential (mV) |
| 22-S14 | 88 | 0.09 | 96 | 3.968 |
| 93-S14 | 119 | 0.02 | 96 | −6.071 |
| Lipid 26, Table 10a | 86 | 0.08 | 92 | −15.24 |

TABLE 36b
Characterization of LNPs

| | | | RNA |
|---|---|---|---|
| Ionizable Lipid | Z-Average(nm) | PDI | Entrapment(%) |
| 22-S14 | 64 | 0.05 | 97 |
| 93-S14 | 74 | 0.04 | 95 |
| Lipid 26, Table 10a | 84 | 0.04 | 96 |

### Example 38

### In Vivo Analysis

[1448] Female CD-1 or female c57BL/6J mice ranging from 22-25 g were dosed at 0.5 mg/kg RNA intravenously. Six hours after injection, mice were injected intraperitoneally with 200 μL of D-luciferin at 15 mg/mL concentration. 5 minutes after injection, mice were anesthetized using isoflurane, and placed inside the IVIS Spectrum In Vivo Imaging System (Perkin Elmer) with dorsal side up. Whole body total IVIS flux of Lipids 22-S14, 93-S14, Lipid 26 (Table 10a) is presented in FIG. 32A. Post 10 minutes injection, mice were scanned for luminescence. Mice were euthanized and organs were extracted within 25 minutes of luciferin injection to scan for luminescence in liver, spleen, kidneys, lungs, and heart. Images (FIGS. 33A-B, 34A-B, 35A-B) were analyzed using Living Images (Perkin Elmer) software. Regions of interest were drawn to obtain flux and average radiance and analyzed for biodistribution of protein expression (FIG. 32A-B).

[1449] FIG. 32A illustrates the increased whole-body total flux observed from luciferase oRNA with Lipid 26 (Table 10a) LNPs compared to LNPs made with lipids 22-S14 and 93-S14. FIG. 32B shows the ex vivo IVIS analysis of tissues further highlighting the increased overall expression with Lipid 26 (Table 10a) while maintaining the desired spleen to liver ratios observed with lipids 22-S14 and 93-S14 despite the significant structural changes designed to improve expression. These data highlight the improvements afforded by Lipid 26 (Table 10a) compared to previously reported lipids.

[1450] Similar analysis as described above was also performed with oRNA encapsulated in LNPs formed with Lipid 15 from Table 10b or Lipid 53 or 54 from Table 10a. FIGS. 36A-C show the ex vivo IVIS analysis of tissues, respectively highlighting the overall expression with Lipid 15, 53, and 54 while maintaining the desired spleen to liver ratios despite the significant structural changes designed to improve expression. FIG. 36D shows the results for PBS control. These data demonstrates the improvements afforded by Lipids 15, 53, and 54 from Table 10a compared to previously reported lipids such as 93-S14 and 22-S14.

### Example 39

### Delivery of Luciferase

[1451] Human peripheral blood mononuclear cells (PBMCs) (Stemcell Technologies) were transfected with lipid nanoparticles (LNP) encapsulating firefly luciferase (fluc) circular RNA and examined for luciferase expression. PBMCs from two different donors were incubated in vitro with five different LNP compositions, containing circular RNA encoding for firefly luciferase (200 ng), at 37° C. in RPMI, 2% human serum, IL-2 (10 ng/mL), and 50 uM BME. PBMCs incubated without LNP were used as a negative control. After 24 hours, the cells were lysed and analyzed for firefly luciferase expression based on bioluminescence (Promega BrightGlo).

[1452] Representative data are presented in FIGS. 37A and 37B, showing that that the tested LNPs are capable of delivering circular RNA into primary human immune cells resulting in protein expression.

### Example 40

### In Vitro Delivery of Green Fluorescent Protein (GFP) or Chimeric Antigen Receptor (CAR)

[1453] Human PBMCs (Stemcell Technologies) were transfected with LNP encapsulating GFP and examined by flow cytometry. PBMCs from five different donors (PBMC A-E) were incubated in vitro with one LNP composition, containing circular RNA encoding either GFP or CD19-CAR (200 ng), at 37° C. in RPMI, 2% human serum, IL-2 (10 ng/mL), and 50 uM BME. PBMCs incubated without LNP were used as a negative control. After 24, 48, or 72 hours post-LNP incubation, cells were analyzed for CD3, CD19, CD56, CD14, CD11b, CD45, fixable live dead, and payload (GFP or CD19-CAR).

[1454] Representative data are presented in FIGS. 38A and 38B, showing that the tested LNP is capable of delivering circular RNA into primary human immune cells resulting in protein expression.

### Example 41

### Multiple IRES Variants can Mediate Expression of Murine CD19 CAR In Vitro

[1455] Multiple circular RNA constructs, encoding anti-murine CD19 CAR, contains unique IRES sequences and were lipotransfected into 1C1C7 cell lines. Prior to lipotransfection, 1C1C7 cells are expanded for several days in complete RPMI Once the cells expanded to appropriate numbers, 1C1C7 cells were lipotransfected (Invitrogen RNAiMAX) with four different circular RNA constructs. After 24 hours, 1C1C7 cells were incubated with His-tagged recombinant murine CD19 (Sino Biological) protein, then stained with a secondary anti-His antibody. Afterwards, the cells were analyzed via flow cytometry.

[1456] Representative data are presented in FIG. 39, showing that IRES sourced from the indicated virus (Apodemus agrarius picornavirus, caprine kobuvirus, parabovirus, and salivirus) are capable of driving expression of an anti-mouse CD19 CAR in murine T cells.

### Example 42

### Murine CD19 CAR Mediates Tumor Cell Killing In Vitro

[1457] Circular RNA encoding anti-mouse CD19 CAR were electroporated into murine T cells to evaluate CAR-mediated cytotoxicity. For electroporation, T cells were electroporated with circular RNA encoding anti-mouse CD19 CAR using ThermoFisher's Neon Transfection System then rested overnight. For the cytotoxicity assay, electroporated T cells were co-cultured with Fluc+ target and non-target cells at 1:1 ratio in complete RPMI containing 10% FBS, IL-2 (10 ng/mL), and 50 uM BME and incubated overnight at 37° C. Cytotoxicity was measured using a luciferase assay system 24 hours post-co-culture (Promega Brightglo Luciferase System) to detect lysis of Fluc+ target and non-target cells. Values shown are calculated relative to the untransfected mock signal.

[1458] Representative data are presented in FIG. 40, showing that an anti-mouse CD19 CAR expressed from circular RNA is functional in murine T cells in vitro.

### Example 43

### Functional Depletion of B Cells with a Lipid Encapsulated Circular RNA Encoding Murine CD19 CAR

[1459] C57BL/6J mice were injected with LNP formed with Lipid 15 in Table 10b, encapsulating circular RNA encoding anti-murine CD19 CAR. As a control, Lipid 15 in Table 10b encapsulating circular RNA encoding firefly luciferase (f.Luc) were injected in different group of mice. Female C57BL.6J, ranging from 20-25 g, were injected intravenously with 5 doses of 0.5 mg/kg of LNP, every other day. Between injections, blood draws were analyzed via flow cytometry for fixable live/dead, CD45, TCRvb, B220, CD11b, and anti-murine CAR. Two days after the last injection, spleens were harvested and processed for flow cytometry analysis. Splenocytes were stained with fixable live/dead, CD45, TCRvb, B220, CD11b, NK1.1, F4/80, CD11c, and anti-murine CAR. Data from mice injected with anti-murine CD19 CAR LNP were normalized to mice that received f.Luc LNP.

[1460] Representative data are presented in FIGS. 41A, 41B, and 41C, showing that an anti-mouse CD19 CAR expressed from circular oRNA delivered in vivo with LNPs is functional in murine T cells in vivo.

### Example 44

### CD19 CAR Expressed from Circular RNA has Higher Yield and Greater Cytotoxic Effect Compared to that Expressed from mRNA

[1461] Circular RNA encoding encoding anti-CD19 chimeric antigen antigen receptor, which includes, from N-terminus to C-terminus, a FMC63-derived scFv, a CD8 transmembrane domain, a 4-1BB costimulatory domain, and a CD3ζ intracellular domain, were electroporated into human peripheral T cells to evaluate surface expression and CAR-mediated cytotoxicity. For comparison, circular RNA-electroporated T cells were compared to mRNA-electroporated T cells in this experiment. For electroporation, CD3+ T cells were isolated from human PBMCs using commercially available T cell isolation kits (Miltenyi Biotec) from donor human PBMCs. After isolation, T cells were stimulated with anti-CD3/anti-CD28 (Stemcell Technologies) and expanded over 5 days at 37° C. in complete RPMI containing 10% FBS, IL-2 (10 ng/mL), and 50 uM BME. Five days post stimulation, T cells were electroporated with circular RNA encoding anti-human CD19 CAR using ThermoFisher's Neon Transfection System and then rested overnight. For the cytotoxicity assay, electroporated T cells were co-cultured with Fluc+ target and non-target cells at 1:1 ratio in complete RPMI containing 10% FBS, IL-2 (10 ng/mL), and 50 uM BME and incubated overnight at 37° C. Cytotoxicity was measured using a luciferase assay system 24 hours post-co-culture (Promega Brightglo Luciferase System) to detect lysis of Fluc+ target and non-target cells. Furthermore, an aliquot of electroporated T cells were taken and stained for live dead fixable staining, CD3, CD45, and chimeric antigen receptors (FMC63) at the day of analysis.

[1462] Representative data are presented in FIGS. 42 and 43. FIGS. 42A and 42B show that an anti-human CD19 CAR expressed from circular RNA is expressed at higher levels and longer than an anti-human CD19 CAR expressed from linear mRNA. FIGS. 43A and 43B show that an anti-human CD19 CAR expressed from circular RNA is exerts a greater cytotoxic effect relative to anti-human CD19 CAR expressed from linear mRNA.

### Example 45

### Functional Expression of Two CARs from a Single Circular RNA

[1463] Circular RNA encoding chimeric antigen receptors were electroporated into human peripheral T cells to evaluate surface expression and CAR-mediated cytotoxicity. The purpose of this study is to evaluate if circular RNA encoding for two CARs can be stochastically expressed with a 2A (P2A) or an IRES sequence. For electroporation, CD3+ T cells were commercially purchased (Cellero) and stimulated with anti-CD3/anti-CD28 (Stemcell Technologies) and expanded over 5 days at 37° C. in complete RPMI containing 10% FBS, IL-2 (10 ng/mL), and 50 uM BME. Four days post stimulation, T cells were electroporated with circular RNA encoding anti-human CD19 CAR, anti-human CD19 CAR-2A-anti-human BCMA CAR, and anti-human CD19 CAR-IRES-anti-human BCMA CAR using ThermoFisher's Neon Transfection System then rested overnight. For the cytotoxicity assay, electroporated T cells were co-cultured with Fluc+K562 cells expressing human CD19 or BCMA antigens at 1:1 ratio in complete RPMI containing 10% FBS, IL-2 (10 ng/mL), and 50 uM BME and incubated overnight at 37° C. Cytotoxicity was measured using a luciferase assay system 24 hours post-co-culture (Promega BrightGlo Luciferase System) to detect lysis of Fluc+ target cells.

[1464] Representative data are presented in FIG. 44, showing that two CARs can be functionally expressed from the same circular RNA construct and exert cytotoxic effector function.

### Example 46

### In Vivo Circular RNA Transfection Using Cre Reporter Mice

[1465] Circular RNAs encoding Cre recombinase (Cre) are encapsulated into lipid nanoparticles as previously described. Female, 6-8 week old B6.Cg-Gt(ROSA)26Sortm9(CAG-tdTomato)Hze/J (Ai9) mice were dosed with lipid nanoparticles at 0.5 mg/kg RNA intravenously. Fluorescent tdTomato protein was transcribed and translated in Ai9 mice upon Cre recombination, meaning circular RNAs have been delivered to and translated in tdTomato+ cells. After 48 hr, mice were euthanized and the spleens were harvested, processed into a single cell suspension, and stained with various fluorophore-conjugated antibodies for immunophenotyping via flow cytometry.

[1466] FIG. 45A shows representative FACS plots with frequencies of tdTomato expression in various spleen immune cell (CD45+, live) subsets, including total myeloid (CD11b+), B cells (CD19+), and T cells (TCR-B+) following treatment with LNPs formed with Lipid 27 or 26 from Table 10a or Lipid 15 from Table 10b. Ai9 mice injected with PBS represented background tdTomato fluorescence. FIG. 45B quantifies the proportion of myeloid cells, B cells, and T cells expressing tdTomato (mean+std. dev., n=3), which is equivalent to the proportion of each cell population which has been successfully transfected with Cre circular RNA. LNPs made with Lipids 27 and 26 from Table 10a exhibit significantly higher myeloid and T cell transfection compared with Lipid 93-S14, highlighting the improvements conferred by lipid structural modifications.

[1467] FIG. 45C illustrates the proportion of additional splenic immune cell populations expressing tdTomato with Lipids 27 and 26 from Table 10a (mean+std. dev., n=3), which also include NK cells (NKp46+, TCR-B−), classical monocytes (CD11b+, Ly-6G-, Ly-6C_hi), nonclassical monocytes (CD11b+, Ly-6G-, Ly-6C_lo), neutrophils (CD11b+, Ly-6G+), and dendritic cells (CD11c+, MHC-II+). These experiments demonstrate that LNPs made with Lipids 27 and 26 from Table 10a and Lipid 15 from Table 10b are effective at delivering circular RNAs to many splenic immune cell subsets in mice and lead to successful protein expression from the circular RNA in those cells.

### Example 47

### Example 47A: Built-in polyA Sequences and Affinity-Purification to Produce Immune-Silent Circular RNA

[1468] PolyA sequences (20-30 nt) were inserted into the 5′ and 3′ ends of the RNA construct (precursor RNA with built-in polyA sequences in the introns). Precursor RNA and introns can alternatively be polyadenylated post-transcriptionally using, e.g., E coli. polyA polymerase or yeast polyA polymerase, which requires the use of an additional enzyme.

[1469] Circular RNA in this example was circularized by in vitro transcription (IVT) and affinity-purified by washing over a commercially available oligo-dT resin to selectively remove polyA-tagged sequences (including free introns and precursor RNA) from the splicing reaction. The IVT was performed with a commercial IVT kit (New England Biolabs) or a customerized IVT mix (Orna Therapeutics), containing guanosine monophosphate (GMP) and guanosine triphosphate (GTP) at different ratios (GMP:GTP=8, 12.5, or 13.75). In some embodiments, GMP at a high GMP:GTP ratio may be preferentially included as the first nucleotide, yielding a majority of monophosphate-capped precursor RNAs. As a comparison, the circular RNA product was alternatively purified by the treatment with Xrn1, Rnase R, and Dnase I (enzyme purification).

[1470] Immunogenicity of the circular RNAs prepared using the affinity purification or enzyme purification process were then assessed. Briefly, the prepared circular RNAs were transfected into A549 cells. After 24 hours, the cells were lysed and interferon beta-1 induction relative to mock samples was measured by qPCR. 3p-hpRNA, a triphosphorylated RNA, was used as a positive control.

[1471] FIGS. 46B and 46C show that the negative selection affinity purification removes non-circular products from splicing reactions when polyA sequences are included on elements that are removed during splicing and present in unspliced precursor molecules. FIG. 46D shows circular RNAs prepared with tested IVT conditions and purification methods are all immunoquiescent. These results suggest the negative selection affinity purification is equivalent or superior to enzyme purification for circular RNA purification and that customized circular RNA synthesis conditions (IVT conditions) may reduce the reliance on GMP excess to achieve maximal immunoquiescence.

### Example 47B: Dedicated Binding Site and Affinity Purification for Circular RNA Production

[1472] Instead of polyA tags, one can include specifically design sequences (DBS, dedicated binding site).

[1473] Instead of a polyA tag, a dedicated binding site (DBS), such as a specifically designed complementary oligonucleotide that can bind to a resin, may be used to selectively deplete precursor RNA and free introns. In this example, DBS sequences (30 nt) were inserted into the 5′ and 3′ ends of the precursor RNA. RNA was transcribed and the transcribed product was washed over a custom complementary oligonucleotide linked to a resin.

[1474] FIGS. 47B and 47C demonstrates that including the designed DBS sequence in elements that are removed during splicing enables the removal of unspliced precursor RNA and free intron components in a splicing reaction, via negative affinity purification.

### Example 47C: Production of a Circular RNA Encoding Dystrophin

[1475] A 12 kb12,000 nt circular RNA encoding dystrophin was produced by in vitro transcription of RNA precursors followed by enzyme purification using a mixture of Xrn1, DNase 1, and RNase R to degrade remaining linear components. FIG. 48 shows that the circular RNA encoding dystrophin was successfully produced.

### Example 48

### 5′ Spacer Between 3′ Intron Fragment and the IRES Improves Circular RNA Expression

[1476] Expression level of purified circRNAs with different 5′ spacers between the 3′ intron fragment and the IRES in Jurkat cells were compared. Briefly, luminescence from secreted Gaussia luciferase in supernatant was measured 24 hours after electroporation of 60,000 cells with 250 ng of each RNA.

[1477] Additionally, stability of purified circRNAs with different 5′ spacers between the 3′ intron fragment and the IRES in Jurkat cells were compared. Briefly, luminescence from secreted Gaussia luciferase in supernatant was measured over 2 days after electroporation of 60,000 cells with 250 ng of each RNA and normalized to day 1 expression.

[1478] The results are shown in FIGS. 49A and 49B, indicating that adding a spacer can enhance IRES function and the importance of sequence identity and length of the added spacer. A potential explanation is that the spacer is added right before the IRES and likely functions by allowing the IRES to fold in isolation from other structured elements such as the intron fragments.

### Example 49

[1479] This example describes deletion scanning from 5′ or 3′ end of the caprine kobuvirus IRES. IRES borders are generally poorly characterized and require empirical analysis, and this example can be used for locating the core functional sequences required for driving translation. Briefly, circular RNA constructs were generated with truncated IRES elements operably linked to a Gaussia luciferase coding sequence. The truncated IRES elements had nucleotide sequences of the indicated lengths removed from the 5′ or 3′ end. Luminescence from secreted Gaussia luciferase in supernatant was measured 24 and 48 hours after electroporation of primary human T cells with RNA. Stability of expression was calculated as the ratio of the expression level at the 48-hour time point relative to that at the 24-hour time point.

[1480] As shown in FIG. 50, deletion of more than 40 nucleotides from the 5′ end of the IRES reduced expression and disrupted IRES function. Stability of expression was relatively unaffected by the truncation of the IRES element but expression level was substantially reduced by deletion of 141 nucleotides from the 3′ end of the IRES, whereas deletion of 57 or 122 nucleotides from the 3′ end had a positive impact on the expression level.

[1481] It was also observed that deletion of the 6-nucleotide pre-start sequence reduced the expression level of the luciferase reporter. Replacement of the 6-nucleotide sequence with a classical kozak sequence (GCCACC) did not have a significant impact but at least maintained expression.

### Example 50

[1482] This example describes modifications (e.g., truncations) of selected selected IRES sequences, including Caprine Kobuvirus (CKV) IRES, Parabovirus IRES, Apodemus Picornavirus (AP) IRES, Kobuvirus SZAL6 IRES, Crohivirus B (CrVB) IRES, CVB3 IRES, and SAFV IRES. The sequences of the IRES elements are provided in SEQ ID NOs: 348-389. Briefly, circular RNA constructs were generated with truncated IRES elements operably linked to a Gaussia luciferase coding sequence. HepG2 cells were transfected with the circular RNAs. Luminescence in the supernatant was assessed 24 and 48 hours after transfection. Stability of expression was calculated as the ratio of the expression level at the 48-hour time point relative to that at the 24-hour time point.

[1483] As shown in FIG. 51, truncations had variable effects depending on the identity of the IRES, which may depend on the initiation mechanism and protein factors used for translation, which often differs between IRES s. 5′ and 3′ deletions can be effectively combined, for example, in the context of CKV IRES. Addition of a canonical Kozak sequence in some cases significantly improved expression (as in SAFV, Full vs Full+K) or diminished expression (as in CKV, 5d40/3d122 vs 5d40/3d122+K).

### Example 51

[1484] This example describes modifications of CK-739, AP-748, and PV-743 IRES sequences, including mutations altative translation initiation sites. Briefly, circular RNA constructs were generated with modified IRES elements operably linked to a Gaussia luciferase coding sequence. Luminescence from secreted Gaussia luciferase in supernatant was measured 24 and 48 hours after transfection of 1C1C7 cells with RNA.

[1485] CUG was the most commonly found alternative start site but many others were also characterized. These triplets can be present in the IRES scanning tract prior to the start codon and can affect translation of correct polypeptides. Four alternative start site mutations were created, with the IRES sequences provided in SEQ ID NOs: 378-380. As shown in FIG. 52, mutations of alternative translation initiation sites in the CK-739 IRES affected translation of correct polypeptides, positively in some instances and negatively in other instances. Mutation of all the alternative translation initiation sites reduced the level of translation.

[1486] Alternative Kozak sequences, 6 nucleotides before start codon, can also affect expression levels. The 6-nucleotide sequence upstream of the start codon were gTcacG, aaagtc, gTcacG, gtcatg, gcaaac, and acaacc, respectively, in CK-739 IRES and Sample Nos. 1-5 in the “6 nt Pre-Start” group. As shown in FIG. 52, substitution of certain 6-nucleotide sequences prior to the start codon affected translation.

[1487] It was also observed that 5′ and 3′ terminal deletions in AP-748 and PV-743 IRES sequences reduced expression. However, in the CK-739 IRES, which had a long scanning tract, translation was relatively unaffected by deletions in the scanning tract.

### Example 52

[1488] This example describes modifications of selected IRES sequences by inserting 5′ and/or 3′ untranslated regions (UTRs) and creating IRES hybrids. Briefly, circular RNA constructs were generated with modified IRES elements operably linked to a Gaussia luciferase coding sequence. Luminescence from secreted Gaussia luciferase in supernatant was measured 24 and 48 hours after transfection of HepG2 cells with RNA.

[1489] IRES sequences with UTRs inserted are provided in SEQ ID NOs: 390-401. As shown in FIG. 53, insertion of 5′ UTR right after the 3′ end of the IRES and before the start codon slightly increased the translation from Caprine Kobuvirus (CK) IRES but in some instances abrogated translation from Salivirus SZ1 IRES. Insertion of 3′ UTR right after the stop cassette had no impact on both IRES sequences.

[1490] Hybrid CK IRES sequences are provided in SEQ ID NOs: 390-401. CK IRES was used as a base, and specific regions of the CK IRES were replaced with similar-looking structures from other IRES sequences, for example, SZ1 and AV (Aichivirus). As shown in FIG. 53, certain hybrid synthetic IRES sequences were functional, indicating that hybrid IRES can be constructed using parts from distinct IRES sequences that show similar predicted structures while deleting these structures completely abrogates IRES function.

### Example 53

[1491] This example describes modifications of circular RNAs by introducing stop codon or cassette variants. Briefly, circular RNA constructs were generated with IRES elements operably linked to a Gaussia luciferase coding sequence followed by variable stop codon cassettes, which included a stop codon in each frame and two stop codons in the reading frame of the Gaussia luciferase coding sequence. 1C1C7 cells were transfected with the circular RNAs. Luminescence in supernatant was assessed 24 and 48 hours after transfection.

[1492] The sequences of the stop codon cassettes are set forth in SEQ ID NOs: 406-412. As shown in FIG. 54, certain stop codon cassettes improved expression levels, although they had little impact on expression stability. In particular, a stop cassette with two frame 1 (the reading frame of the Gaussia luciferase coding sequence) stop codons, the first being TAA, followed by a frame 2 stop codon and a frame 3 stop codon, is effective for promoting functional translation.

### Example 54

[1493] This example describes modifications of circular RNAs by inserting 5′ UTR variants. Briefly, circular RNA constructs were generated with IRES elements with 5′ UTR variants inserted between the 3′ end of the IRES and the start codon, the IRES being operably linked to a Gaussia luciferase coding sequence. 1C1C7 cells were transfected with the circular RNAs. Luminescence in supernatant was assessed 24 and 48 hours after transfection.

[1494] The sequences of the 5′ UTR variants are set forth in SEQ ID NOs: 402-405. As shown in FIG. 55, a CK IRES with a canonical Kozak sequence (UTR4) was more effective when a 36-nucleotide unstructured/low GC spacer sequence was added (UTR2), suggesting that the GC-rich Kozak sequences may interfere with core IRES folding. Using a higher-GC/structured spacer with a kozak sequence did not show the same benefit (UTR3), possibly due to interference with IRES folding by the spacer itself. Mutating the kozak sequence to gTcacG (UTR1) enhanced translation to the same level as the Kozak+spacer alternative without the need for a spacer.

### Example 55

[1495] This example describes the impact of miRNA target sites in circular RNAs on expression levels. Briefly, circular RNA constructs were generated with IRES elements operably linked to a human erythropoietin (hEPO) coding sequence, where 2 tandem miR-122 target sites were inserted into the construct. miR-122-expressing Huh7 cells were transfected with the circular RNAs. hEPO expression in supernatant was assessed 24 and 48 hours after transfection by sandwich ELISA.

[1496] As shown in FIG. 56, the hEPO expression level was obrogated where the miR-122 target sites were inserted into the circular RNA. This result demonstrates that expression from circular RNA can be regulated by miRNA. As such, cell type- or tissue-specific expression can be achieved by incorporating target sites of the miRNAs expressed in the cell types in which expression of the recombinant protein is undesirable.

### INCORPORATION BY REFERENCE

[1497] All publications, patents, and patent applications mentioned in this specification are herein incorporated by reference to the same extent as if each individual publication, patent, or patent application was specifically and individually indicated as being incorporated by reference herein.

What is claimed is:

1. A pharmaceutical composition comprising:
a. a RNA polynucleotide, and
b. an in vivo transfer vehicle comprising an ionizable lipid represented by Formula (1): [chemical structure]
wherein:
each n is independently an integer from 2-15;
L₁ and L₃ are each independently —OC(O)—* or —C(O)O—*, wherein “*” indicates the attachment point to R₁ or R₃;
R₁ and R₃ are each independently a linear or branched C₉-C₂₀ alkyl or C₉-C₂₀ alkenyl, optionally substituted by one or more substituents selected from a group consisting of oxo, halo, hydroxy, cyano, alkyl, alkenyl, aldehyde, heterocyclylalkyl, hydroxyalkyl, dihydroxyalkyl, hydroxyalkylaminoalkyl, aminoalkyl, alkylaminoalkyl, dialkylaminoalkyl, (heterocyclyl)(alkyl)aminoalkyl, heterocyclyl, heteroaryl, alkylheteroaryl, alkynyl, alkoxy, amino, dialkylamino, aminoalkylcarbonylamino, aminocarbonylalkylamino, (aminocarbonylalkyl)(alkyl)amino, alkenylcarbonylamino, hydroxycarbonyl, alkyloxycarbonyl, aminocarbonyl, aminoalkylaminocarbonyl, alkylaminoalkylaminocarbonyl, dialkylaminoalkylaminocarbonyl, heterocyclylalkylaminocarbonyl, (alkylaminoalkyl)(alkyl)aminocarbonyl, alkylaminoalkylcarbonyl, dialkylaminoalkylcarbonyl, heterocyclylcarbonyl, alkenylcarbonyl, alkynylcarbonyl, alkylsulfoxide, alkylsulfoxidealkyl, alkylsulfonyl, and alkylsulfonealkyl; and
R₂ is selected from a group consisting of:

[chemical structure]

[chemical structure]

2. The pharmaceutical composition of claim 1, wherein the ionizable lipid is represented by Formula (1-1) or Formula (1-2):

[chemical structure]

3. The pharmaceutical composition of claim 1, wherein the ionizable lipid is selected from the group consisting of:

[chemical structure]

4. The pharmaceutical composition of claim 1, wherein said RNA polynucleotide is a circular RNA polynucleotide.

5. A pharmaceutical composition comprising:
a. a RNA polynucleotide, and
b. an in vivo transfer vehicle comprising an ionizable lipid represented by Formula (3): [chemical structure]
wherein:
X is selected from —O—, —S—, or —OC(O)—*, wherein * indicates the attachment point to R₁;
R₁ is selected from a group consisting of: [chemical structure]
and
R₂ is selected from a group consisting of:

[chemical structure]

[chemical structure]

6. The pharmaceutical composition of claim 5, wherein the RNA polynucleotide is a circular RNA polynucleotide.

7. The pharmaceutical composition of claim 1, wherein the RNA polynucleotide comprises, in the following order:
a. a post-splicing intron fragment of a 3′ group I intron fragment,
b. an IRES,
c. an expression sequence, and
d. a post-splicing intron fragment of a 5′ group I intron fragment.

8. The pharmaceutical composition of claim 7, comprising a first spacer before the post-splicing intron fragment of the 3′ group I intron fragment, and a second spacer after the post-splicing intron fragment of the 5′ group I intron fragment.

9. The pharmaceutical composition of claim 8, wherein the first and second spacers each have a length of about 10 to about 60 nucleotides.

10. The pharmaceutical composition of claim 1, wherein the RNA polynucleotide is made via circularization of a precursor RNA polynucleotide comprising, in the following order:
a. a 3′ group I intron fragment,
b. an IRES,
c. an expression sequence, and
d. a 5′ group I intron fragment.

11. The pharmaceutical composition of claim 1, wherein the RNA polynucleotide is made via circularization of a precursor RNA polynucleotide comprising, in the following order:
a. a 5′ external duplex forming region,
b. a 3′ group I intron fragment,
c. a 5′ internal spacer optionally comprising a 5′ internal duplex forming region,
d. an IRES,
e. an expression sequence,
f. a 3′ internal spacer optionally comprising a 3′ internal duplex forming region,
g. a 5′ group I intron fragment, and
h. a 3′ external duplex forming region.

12. The pharmaceutical composition of claim 1, wherein the RNA polynucleotide is made via circularization of a precursor RNA polynucleotide comprising, in the following order:
a. a 5′ external duplex forming region,
b. a 5′ external spacer,
c. a 3′ group I intron fragment,
d. a 5′ internal spacer optionally comprising a 5′ internal duplex forming region,
e. an IRES,
f. an expression sequence,
g. a 3′ internal spacer optionally comprising a 3′ internal duplex forming region,
h. a 5′ group I intron fragment,
i. a 3′ external spacer, and
j. a 3′ external duplex forming region.

13. The pharmaceutical composition of claim 1, wherein the RNA polynucleotide is made via circularization of a precursor RNA polynucleotide comprising, in the following order:
a. a 3′ group I intron fragment,
b. a 5′ internal spacer comprising a 5′ internal duplex forming region,
c. an IRES,
d. an expression sequence,
e. a 3′ internal spacer comprising a 3′ internal duplex forming region, and
f. a 5′ group I intron fragment.

14. The pharmaceutical composition of claim 1, wherein the RNA polynucleotide is made via circularization of a precursor RNA polynucleotide comprising, in the following order:
a. a 5′ external duplex forming region,
b. a 5′ external spacer,
c. a 3′ group I intron fragment,
d. a 5′ internal spacer comprising a 5′ internal duplex forming region,
e. an IRES,
f. an expression sequence,
g. a 3′ internal spacer comprising a 3′ internal duplex forming region,
h. a 5′ group I intron fragment,
i. a 3′ external spacer, and
j. a 3′ external duplex forming region.

15. The pharmaceutical composition of claim 1, wherein the RNA polynucleotide is made via circularization of a precursor RNA polynucleotide comprising, in the following order:
a. a first polyA sequence,
b. a 5′ external duplex forming region,
c. a 5′ external spacer,
d. a 3′ group I intron fragment,
e. a 5′ internal spacer comprising a 5′ internal duplex forming region,
f. an IRES,
g. an expression sequence,
h. a 3′ internal spacer comprising a 3′ internal duplex forming region,
i. a 5′ group I intron fragment,
j. a 3′ external spacer,
k. a 3′ external duplex forming region, and
l. a second polyA sequence.

16. The pharmaceutical composition of claim 1, wherein the RNA polynucleotide is made via circularization of a precursor RNA polynucleotide comprising, in the following order:
a. a first polyA sequence,
b. a 5′ external spacer,
c. a 3′ group I intron fragment,
d. a 5′ internal spacer comprising a 5′ internal duplex forming region,
e. an IRES,
f. an expression sequence,
g. a 3′ internal spacer comprising a 3′ internal duplex forming region,
h. a 5′ group I intron fragment,
i. a 3′ external spacer, and
j. a second polyA sequence.

17. The pharmaceutical composition of claim 1, wherein the RNA polynucleotide is made via circularization of a precursor RNA polynucleotide comprising, in the following order:
a. a first polyA sequence,
b. a 5′ external spacer,
c. a 3′ group I intron fragment,
d. a 5′ internal spacer comprising a 5′ internal duplex forming region,
e. an IRES,
f. an expression sequence,
g. a stop condon cassette,
h. a 3′ internal spacer comprising a 3′ internal duplex forming region,
i. a 5′ group I intron fragment,
j. a 3′ external spacer, and
k. a second polyA sequence.

18. The pharmaceutical composition of claim 1, wherein the RNA polynucleotide is made via circularization of a precursor RNA polynucleotide comprising, in the following order:
a. a binding site,
b. a 5′ external spacer,
c. a 3′ group I intron fragment,
d. a 5′ internal spacer comprising a 5′ internal duplex forming region,
e. an IRES,
f. an expression sequence,
g. a 3′ internal spacer comprising a 3′ internal duplex forming region,
h. a 5′ group I intron fragment,
i. a 3′ external spacer, and
j. a second binding site.

19. The pharmaceutical composition of claim 10, wherein the IRES has a sequence of an IRES from Taura syndrome virus, Triatoma virus, Theiler's encephalomyelitis virus, Simian Virus 40, Solenopsis invicta virus 1, Rhopalosiphum padi virus, Reticuloendotheliosis virus, Human poliovirus 1, Plautia stali intestine virus, Kashmir bee virus, Human rhinovirus 2, Homalodisca coagulata virus-1, Human Immunodeficiency Virus type 1, Homalodisca coagulata virus-1, Himetobi P virus, Hepatitis C virus, Hepatitis A virus, Hepatitis GB virus, Foot and mouth disease virus, Human enterovirus 71, Equine rhinitis virus, Ectropis obliqua picorna-like virus, Encephalomyocarditis virus, Drosophila C Virus, Human coxsackievirus B3, Crucifer tobamovirus, Cricket paralysis virus, Bovine viral diarrhea virus 1, Black Queen Cell Virus, Aphid lethal paralysis virus, Avian encephalomyelitis virus, Acute bee paralysis virus, Hibiscus chlorotic ringspot virus, Classical swine fever virus, Human FGF2, Human SFTPA1, Human AML1/RUNX1, Drosophila antennapedia, Human AQP4, Human AT1R, Human BAG-1, Human BCL2, Human BiP, Human c-IAP1, Human c-myc, Human eIF4G, Mouse NDST4L, Human LEF1, Mouse HIF1 alpha, Human n.myc, Mouse Gtx, Human p27kip1, Human PDGF2/c-sis, Human p53, Human Pim-1, Mouse Rbm3, Drosophila reaper, Canine Scamper, Drosophila Ubx, Human UNR, Mouse UtrA, Human VEGF-A, Human XIAP, Drosophila hairless, S. cerevisiae TFIID, S. cerevisiae YAP1, tobacco etch virus, turnip crinkle virus, EMCV-A, EMCV-B, EMCV-Bf, EMCV-Cf, EMCV pEC9, Picobirnavirus, HCV QC64, Human Cosavirus E/D, Human Cosavirus F, Human Cosavirus JMY, Rhinovirus NAT001, HRV14, HRV89, HRVC-02, HRV-A21, Salivirus A SH1, Salivirus FHB, Salivirus NG-J1, Human Parechovirus 1, Crohivirus B, Yc-3, Rosavirus M-7, Shanbavirus A, Pasivirus A, Pasivirus A 2, Echovirus E14, Human Parechovirus 5, Aichi Virus, Hepatitis A Virus HA16, Phopivirus, CVA10, Enterovirus C, Enterovirus D, Enterovirus J, Human Pegivirus 2, GBV-C GT110, GBV-C K1737, GBV-C Iowa, Pegivirus A 1220, Pasivirus A 3, Sapelovirus, Rosavirus B, Bakunsa Virus, Tremovirus A, Swine Pasivirus 1, PLV-CHN, Pasivirus A, Sicinivirus, Hepacivirus K, Hepacivirus A, BVDV1, Border Disease Virus, BVDV2, CSFV-PK15C, SF573 Dicistrovirus, Hubei Picorna-like Virus, CRPV, Apodemus Agrarius Picornavirus, Caprine Kobuvirus, Parabovirus, Salivirus A BN5, Salivirus A BN2, Salivirus A 02394, Salivirus A GUT, Salivirus A CH, Salivirus A SZ1, Salivirus FHB, CVB3, CVB1, Echovirus 7, CVB5, EVA71, CVA3, CVA12, EV24, or an aptamer to eIF4G.

20. The pharmaceutical composition of claim 1, wherein the composition has a duration of therapeutic effect in vivo in humans greater than that of a composition comprising a reference linear RNA polynucleotide having the same expression sequence as the circular RNA polynucleotide.

21. The pharmaceutical composition of claim 20, wherein the duration of therapeutic effect in vivo in humans is determined by a functional protein assay comprising measuring levels of protein encoded by the expression sequence of the circular RNA polynucleotide in a serum or tissue sample.

22. The pharmaceutic composition of claim 1, further comprising a structural lipid and a PEG-modified lipid.

23. The pharmaceutical composition of claim 22, wherein the structural lipid binds to C1q and/or promotes the binding of the transfer vehicle comprising said lipid to C1q compared to a control transfer vehicle lacking the structural lipid and/or increases uptake of C1q-bound transfer vehicle into an immune cell compared to a control transfer vehicle lacking the structural lipid.

24. A method of treating or preventing a disease, disorder, or condition, comprising administering an effective amount of a pharmaceutical composition to at least one eukaryotic cell of a patient in need thereof, wherein the pharmaceutical composition is selected from the group consisting of:
a. an RNA polynucleotide, and
b. a transfer vehicle comprising an ionizable lipid selected from the group consisting of:
i. an ionizable lipid represented by Formula (1): [chemical structure]
wherein:
each n is independently an integer from 2-15;
L₁ and L₃ are each independently —OC(O)—* or —C(O)O—*, wherein “*” indicates the attachment point to R₁ or R₃;
R₁ and R₃ are each independently a linear or branched C₉-C₂₀ alkyl or C₉-C₂₀ alkenyl, optionally substituted by one or more substituents selected from a group consisting of oxo, halo, hydroxy, cyano, alkyl, alkenyl, aldehyde, heterocyclylalkyl, hydroxyalkyl, dihydroxyalkyl, hydroxyalkylaminoalkyl, aminoalkyl, alkylaminoalkyl, dialkylaminoalkyl, (heterocyclyl)(alkyl)aminoalkyl, heterocyclyl, heteroaryl, alkylheteroaryl, alkynyl, alkoxy, amino, dialkylamino, aminoalkylcarbonylamino, aminocarbonylalkylamino, (aminocarbonylalkyl)(alkyl)amino, alkenylcarbonylamino, hydroxycarbonyl, alkyloxycarbonyl, aminocarbonyl, aminoalkylaminocarbonyl, alkylaminoalkylaminocarbonyl, dialkylaminoalkylaminocarbonyl, heterocyclylalkylaminocarbonyl, (alkylaminoalkyl)(alkyl)aminocarbonyl, alkylaminoalkylcarbonyl, dialkylaminoalkylcarbonyl, heterocyclylcarbonyl, alkenylcarbonyl, alkynylcarbonyl, alkylsulfoxide, alkylsulfoxidealkyl, alkylsulfonyl, and alkylsulfonealkyl; and
R₂ is selected from a group consisting of: [chemical structure] [chemical structure]
and
ii. an ionizable lipid represented by Formula (3): [chemical structure]
wherein:
X is selected from —O—, —S—, or —OC(O)—*, wherein * indicates the attachment point to R₁;
R₁ is selected from a group consisting of: [chemical structure]
and
R₂ is selected from a group consisting of:

[chemical structure]

[chemical structure]

25. The method of claim 24, wherein the eukaryotic cell is a hepatocyte, epithelial cell, hematopoietic cell, epithelial cell, endothelial cell, lung cell, bone cell, stem cell, mesenchymal cell, neural cell, photoreceptor cells, retinal pigmented epithelial cells, secretory cells, cardiac cells, adipocytes, vascular smooth muscle cells, cardiomyocytes, skeletal muscle cells, beta cells, pituitary cells, synovial lining cells, ovarian cells, testicular cells, fibroblasts, B cells, T cells, reticulocytes, leukocytes, granulocytes and tumor cells, an NK cell, an NKT cell, a macrophage, or a neutrophil.

26. The method of claim 24, wherein the RNA polynucleotide encodes a therapeutic protein, cytokine or functional fragment, immune check point inhibitor, agonist, secreted T cell, immunosuppressant enzyme, GvHD, or a transcription factor.

27. The method of claim 26, wherein the therapeutic protein is a chimeric antigen receptor.

28. The method of claim 24, wherein the transfer vehicle comprises a targeting moiety operably connected to a transfer vehicle.

29. The method of claim 24, wherein the RNA polynucleotide is a circular RNA polynucleotide.

30. The method of claim 24, wherein the transfer vehicle comprises an in vivo transfer vehicle.

The application's sequence listing, which the Patent Office published only in electronic form, follows.

SEQUENCE LISTING (717 sequences)

SEQ ID NO: 1 - DNA, 585 bp, Unknown
  Description of Unknown: Encephalomyocarditis virus sequence
cccccctctccctccccccctaacgttactggccgaagccgcttggaataaggccggtgtgcgtttgtctatatgttattttccaccatattgccgtcttttggcaatgtgagggcccggaaacctggccctgtcttcttgacgagcattcctaggggtctttcccctctcgccaaaggaatgcaaggtctgttgaatgtcgtgaaggaagcagttcctctggaagcttcttgaagacaaacaacgtctgtagcgaccctttgcaggcagcggaaccccccacctggcgacaggtgcctctgcggccaaaagccacgtgtataagatacacctgcaaaggcggcacaaccccagtgccacgttgtgagttggatagttgtggaaagagtcaaatggctctcctcaagcgtattcaacaaggggctgaaggatgcccagaaggtaccccattgtatgggatctgatctggggcctcggtgcacatgctttacatgtgtttagtcgaggttaaaaaacgtctaggccccccgaaccacggggacgtggttttcctttgaaaaacacgatgataatatggccacaacc

SEQ ID NO: 2 - DNA, 568 bp, Unknown
  Description of Unknown: Encephalomyocarditis virus sequence
ctccccctccccccccttactatactggccgaagccacttggaataaggccggtgtgcgtttgtctacatgctattttctaccgcattaccgtcttatggtaatgtgagggtccagaacctgaccctgtcttcttgacgaacactcctaggggtctttcccctctcgacaaaggagtgtaaggtctgttgaatgtcgtgaaggaagcagttcctctggaagcttcttaaagacaaacaacgtctgtagcgaccctttgcaggcagcggaaccccccacctggtgacaggtgcctctgcggccaaaagccacgtgtataagatacacctgcaaaggcggcacaaccccagtgccacgttgtgagttggatagttgtggaaagagtcaaatggctctcctcaagcgtattcaacaaggggctgaaggatgcccagaaggtaccccattgtatgggatctgatctggggcctcggtgcacgtgctttacacgtgttgagtcgaggtgaaaaaacgtctaggccccccgaaccacggggacgtggttttcctttgaaaaccacgattacaat

SEQ ID NO: 3 - DNA, 696 bp, Unknown
  Description of Unknown: Encephalomyocarditis virus sequence
ttgccagtctgctcgatatcgcaggctgggtccgtgactacccactccccctttcaacgtgaaggctacgatagtgccagggcgggtactgccgtaagtgccaccccaaacaacaacaacaaaacaaactccccctccccccccttactatactggccgaagccacttggaataaggccggtgtgcgtttgtctacatgctattttctaccgcattaccgtcttatggtaatgtgagggtccagaacctgaccctgtcttcttgacgaacactcctaggggtctttcccctctcgacaaaggagtgtaaggtctgttgaatgtcgtgaaggaagcagttcctctggaagcttcttaaagacaaacaacgtctgtagcgaccctttgcaggcagcggaaccccccacctggtgacaggtgcctctgcggccaaaagccacgtgtataagatacacctgcaaaggcggcacaaccccagtgccacgttgtgagttggatagttgtggaaagagtcaaatggctctcctcaagcgtattcaacaaggggctgaaggatgcccagaaggtaccccattgtatgggatctgatctggggcctcggtgcacgtgctttacacgtgttgagtcgaggtgaaaaaacgtctaggccccccgaaccacggggacgtggttttcctttgaaaaccacgattacaat

SEQ ID NO: 4 - DNA, 697 bp, Unknown
  Description of Unknown: Encephalomyocarditis virus sequence
ttgccagtctgctcgatatcgcaggctgggtccgtgactacccactccccctttcaacgtgaaggctacgatagtgccagggcgggtactgccgtaagtgccaccccaaaacaacaacaaccccccctctccctcctccccccctaacgttactggccgaagccgcttggaataaggccggtgtgcgtttgtctatatgttattttccaccatattgccgtcttttggcaatgtgagggcccggaaacctggccctgtcttcttgacgagcattcctaggggtctttcccctctcgccaaaggaatgcaaggtctgttgaatgtcgtgaaggaagcagttcctctggaagcttcttgaagacaaacaacgtctgtagcgaccctttgcaggcagcggaaccccccacctggcgacaggtgcctctgcggccaaaagccacgtgtataagatacacctgcaaaggcggcacaaccccagtgccacgttgtgagttggatagttgtggaaagagtcaaatggctctcctcaagcgtattcaacaaggggctgaaggatgcccagaaggtaccccattgtatgggatctgatctggggcctcggtgcacatgctttacatgtgtttagtcgaggttaaaaaacgtctaggccccccgaaccacggggacgtggttttcctttgaaaaacacgatgataat

SEQ ID NO: 5 - DNA, 562 bp, Unknown
  Description of Unknown: Encephalomyocarditis virus sequence
ccccccccctaacgttactggccgaagccgcttggaataaggccggtgtgcgtttgtctatatgttattttccaccatattgccgtcttttggcaatgtgagggcccggaaacctggccctgtcttcttgacgagcattcctaggggtctttcccctctcgccaaaggaatgcaaggtctgttgaatgtcgtgaaggaagcagttcctctggaagcttcttgaagacaaacaacgtctgtagcgaccctttgcaggcagcggaaccccccacctggcgacaggtgcctctgcggccaaaagccacgtgtataagatacacctgcaaaggcggcacaaccccagtgccacgttgtgagttggatagttgtggaaagagtcaaatggctctcctcaagcgtattcaacaaggggctgaaggatgcccagaaggtaccccattgtatgggatctgatctggggcctcggtgcacatgctttacatgtgtttagtcgaggttaaaaaacgtctaggccccccgaaccacggggacgtggttttcctttgaaaaacacgatgataat

SEQ ID NO: 6 - DNA, 156 bp, Unknown
  Description of Unknown: Picobirnavirus sp. sequence
gtaaattaaatgctatttacaaaatttaaacagaaaggagagatgttatgaaccggttttacaaggtttcatacatcgaaaatagcactacctggggcagccgacacactaacatcgtctgtttaaccagaagtgttactgaaaggaggttattta

SEQ ID NO: 7 - DNA, 340 bp, Unknown
  Description of Unknown: Hepatitis C virus sequence
acctgcccctaataggggcgacactccgccatgaatcactcccctgtgaggaactactgtcttcacgcagaaagcgtctagccatggcgttagtatgagtgtcgtacagcctccaggcccccccctcccgggagagccatagtggtctgcggaaccggtgagtacaccggaattgccgggaagactgggtcctttcttggataaacccactctatgcccggacatttgggcgtgcccccgcaagactgctagccgagtagcgttgggttgcgaaaggccttgtggtactgcctgatagggtgcttgcgagtgccccgggaggtctcgtagaccgtgcatc

SEQ ID NO: 8 - DNA, 315 bp, Unknown
  Description of Unknown: Human Cosavirus sequence
ctacaagctttgtgtaaacaaacttttgtttggcttttctcaagcttctctcacatcaggccccaaagatgtcctgaaggtaccccgtgtatctgaggatgagcaccatcgactacccggacctgcaaaattttgcaaacgcatgtggtatcccagccccctcctctcggggagggggctttgctcactcagcacaggatctgatcaggagatccacctccggtgctttacaccggggcgtggatttaaaaattgcccaaggcctggcgcacaacctaggggactaggttttccttatattttaaagctgtcaat

SEQ ID NO: 9 - DNA, 182 bp, Unknown
  Description of Unknown: Human Cosavirus sequence
gtcttaggacgacgcatgtggtatcccagcccccgcctacattggcgggggcttttgaagcaccagacactggatctgatcaggaggagggtagctgctttacagcccctcttaaaaattgcccaaggtccggccacccaacctaggggactaggttttccttttatttttaaattgtcatt

SEQ ID NO: 10 - DNA, 759 bp, Unknown
  Description of Unknown: Human Cosavirus sequence
acatgggggagactgcatgtggcagtcttgaaacgtgtggtttgacgtctaccttatatggcagtgggtggagtactgcaaagatgtcaccgtgctttacacggtttttgaaccccacaccggctgtttgacgctcgtagggcagcaggtttattttcattaaaattcttactttctagctgcatgagttctattcatgcagacggagtgatactcccgttccttcttggacaggttgcctccacgccctttgtggatcttaaggtgaccaagtcactggtgttggaggtgaagatagagagtcctcttgggaatgtcatgtggctgtgccaggggttgtagcgatgccattcgtgtgtgcggatttcctctcgtggtgacacgagcctcacaggccaaaagccccgtccgaaaggacccgaatggtggagtgaccctgactcccccctgcatagttttgtgattaggaacttgaggaatttctgtcataaatctctatcacatcaggccccaaagatgtcctgaaggtaccctgtgtatctgaggatgagcaccaccgactacccggacttgcattagcagacacatgtggttgcccagccccacctcttcagaggtggggctttgctcactcagcacaggatctgatcaggagccccgctcgtgtgctttacactcgacgcggggttaaaaattgcccaaggcctggcacaacaacctaggggactaggttttcctatttttgtaaattatgtcaat

SEQ ID NO: 11 - DNA, 478 bp, Unknown
  Description of Unknown: Human rhinovirus sequence
gtgacaatcagccagattgttaacggtcaagcacttctgtttccccggtacccttgtatacgcttcacccgaggcgaaaagtgaggttatcgttatccgcaaagtgcctacgagaagcctagtagcacttttgaagcctatggctggtcgctcaactgtttacccagcagtagacctggcagatgaggctagatgttccccaccagcgatggtgatctagcctgcgtggctgcctgcacactctattgagtgtgaagccagaaagtggacaaggtgtgaagagcctattgtgctcactttgagtcctccggcccctgaatgtggctaatcctaaccccgtagctgttgcatgtaatccaacatgtctgcagtcgtaatgggcaactatgggatggaaccaactactttgggtgtccgtgtttcttgtttttctttatgcttgcttatggtgacaactgtagttattacatttgttacc

SEQ ID NO: 12 - DNA, 628 bp, Unknown
  Description of Unknown: Human rhinovirus sequence
ttaaaacagcggatgggtatcccaccattcgacccattgggtgtagtactctggtactatgtacctttgtacgcctgtttctccccaaccacccttccttaaaattcccacccatgaaacgttagaagcttgacattaaagtacaataggtggcgccatatccaatggtgtctatgtacaagcacttctgtttcccaggagcgaggtataggctgtacccactgccaaaagcctttaaccgttatccgccaaccaactacgtaacagttagtaccatcttgttcttgactggacgttcgatcaggtggattttccctccactagtttggtcgatgaggctaggaattccccacgggtgaccgtgtcctagcctgcgtggcggccaacccagcttatgctgggacgcccttttaaggacatggtgtgaagactcgcatgtgcttggttgtgagtcctccggcccctgaatgcggctaaccttaaccctagagccttatgccacgatccagtggttgtaaggtcgtaatgagcaattccgggacgggaccgactactttgggtgtccgtgtttctcatttttcttcatattgtcttatggtcacagcatatatatacatatactgtgatc

SEQ ID NO: 13 - DNA, 618 bp, Unknown
  Description of Unknown: Human rhinovirus sequence
ttaaaactgggagtgggttgttcccactcactccacccatgcggtgttgtactctgttattacggtaactttgtacgccagtttttcccacccttccccataatgtaacttagaagtttgtacaatatgaccaataggtgacaatcatccagactgtcaaaggtcaagcacttctgtttccccggtcaatgaggatatgctttacccaaggcaaaaaccttagagatcgttatccccacactgcctacacagagcccagtaccatttttgatataattgggttggtcgctccctgcaaacccagcagtagacctggcagatgaggctggacattccccactggcgacagtggtccagcctgcgtggctgcctgctcacccttcttgggtgagaagcctaattattgacaaggtgtgaagagccgcgtgtgctcagtgtgcttcctccggcccctgaatgtggctaaccttaaccctgcagccgttgcccataatccaatgggtttgcggtcgtaatgcgtaagtgcgggatgggaccaactactttgggtgtccgtgtttcctgtttttcttttgattgcattttatggtgacaatttatagtgtatagattgtcatc

SEQ ID NO: 14 - DNA, 610 bp, Unknown
  Description of Unknown: Human rhinovirus sequence
ttaaaactgggtacaggttgttcccacctgtatcacccacgtggtgtggtgctcttgtattccggtacacttgcacgccagtttgccacccctcacccgtcgtaacttagaagctaacaactcgaccaacaggcggtggtaaaccataccacttacggtcaagcactcctgtttccccggtatgcgaggaatagactcctacagggttgaagcctcaagtatcgttatccgcattggtactacgcaaagcttagtagtgccttgaaagtcccttggttggtcgctccgctagtttcccctagtagacctggcagatgaggcaggacactccccactggcgacagtggtcctgcctgcgtggctgcctgcgcacccttaggggtgcgaagccaagtgacagacaaggtgtgaagagccccgtgtgctaccaatgagtcctccggcccctgaatgcggctaatccaaccccacagctattgcacacaagccagtgtgtatgtagtcgtaatgagcaattgtgggacggaaccgactactttgggtgtccgtgtttccttttattcttatcattctgcttatggtgacaatactgtgaaatagtgttgttacc

SEQ ID NO: 15 - DNA, 614 bp, Unknown
  Description of Unknown: Human rhinovirus sequence
taaaactggatccaggttgttcccacctggatctcctattgggagttgtactctattattccggtaattttgtacgccagttttatcttccccctccccaattgtaacttagaaggttatcaatacgaccaataggtggtagttagccaaactaccaaaggtcaagcacttctgtttccccggtcaaagttgatatgctccaacagggcaaaaacaactgagatcgttatccgcaaagtgcctacgcaaagcctagtaacacctttgaagatttatggttggtcgttccgctatttcccatagtagacctggcagatgaggctagaaatcccccactggcgacagtgctctagcctgcgtggctgcctgcgcaccccttgggtgcgaagccatacattggacaaggtgtgaagagccccgtgtgctcactttgagtcctccggcccctgaatgtggctaaccttaaccctgcagctagtgcatgtaatccaacatgttgctagtcgtaatgagtaattgcgggacgggaccaactactttgggtgtccgtgtttcactttttccttttaatattgcttatggtgacaatatatatagctatatatattgacacc

SEQ ID NO: 16 - DNA, 624 bp, Unknown
  Description of Unknown: Salivirus A sequence
ttcccctgcaaccattacgcttactcgcatgtgcattgagtggtgcatgtgttgaacaaacagctacactcacatgggggcgggttttcccgccctacggcttctcgcgaggcccacccctcccctttctcccataactacagtgctttggtaggtaagcatcctgatcccccgcggaagctgctcacgtggcaactgtggggacccagacaggttatcaaaggcacccggtctttccgccttcaggagtatccctgctagcgaattctagtagggctctgcttggtgccaacctcccccaaatgcgcgctgcgggagtgctcttccccaactcaccctagtatcctctcatgtgtgtgcttggtcagcatatctgagacgatgttccgctgtcccagaccagtccagtaatggacgggccagtgtgcgtagtcgtcttccggcttgtccggcgcatgtttggtgaaccggtggggtaaggttggtgtgcccaacgcccgtactcaggggatacctcaaggcacccaggaatgccagggaggtaccccgcttcacagcgggatctgaccctggggtaaatgtctgcggggggtcttcttggcccacttctcagtacttttcagg

SEQ ID NO: 17 - DNA, 730 bp, Unknown
  Description of Unknown: Salivirus FHB sequence
acatggggggtctgcggacggcttcggcccacccgcgacaagaatgccgtcatctgtcctcattacccgtattccttcccttcccccgcaaccaccacgcttactcgcgcacgtgttgagtggcacgtgcgttgtccaaacagctacacccacacccttcggggcgggtttgtcccgccctcgggttcctcgcggaacccccccctccctctctctctttctatccgccctcacttcccataactacagtgctttggtaggtgagcaccctgaccccccgcggaagctgctaacgtggcaactgtggggatccaggcaggttatcaaaggcacccggtctttccgccttcaggagtatctctgccggtgaattccggtagggctctgcttggtgccaacctcccccaaatgcgcgctgcgggagtgctcttccccaactcatcttagtaacctctcatgtgtgtgcttggtcagcatatctgaggcgacgttccgctgtcccagaccagtccagcaatggacgggccagtgtgcgtagtcgctttccggttttccggcgcatgtttggcgaaacgctgaggtaaggttggtgtgcccaacgcccgtaatttggtgatacctcaagaccacccaggaatgccagggaggtaccccacttcggtgggatctgaccctgggctaattgtctacggtggttcttcttgcttccacttctcttttttctggcatg

SEQ ID NO: 18 - DNA, 709 bp, Unknown
  Description of Unknown: Salivirus NG-J1 sequence
tatggcaggcgggcttgtggacggcttcggcccacccacagcaagaatgccatcatctgtcctcacccccaattttcccttttcttcccctgcaaccattacgcttactcgcatgtgcattgagtggtgcatgtgttgaacaaacagctacactcacatgggggcgggttttcccgccctacggcctctcgcgaggcccaccccttccctccccttataactacagtgctttggtaggtaagcatcctgatcccccgcggaagctgctcacgtggcaactgtggggacccagacaggttatcaaaggcacccggtctttccgccttcaggagtatccctactagtgaattctagcggggctctgcttggtgccaacctcccccaaatgcgcgctgcgggagtgctcttccccaactcaccctagtatcctctcatgtgtgtgcttggtcagcatatctgagacgatgttccgctgtcccagaccagtccagtaatggacgggccagtgcgtgtagtcgtcttccggcttgtccggggcatgtttggtgaaccggtggggtaaggttggtgtgcccaacgcccgtactttggtgacacctcaagaccacccaggaatgccagggaggtaccccacctcacggtgggatctgaccctgggctaattgtctacggtggttcttcttgcttccacttctttcttctgttcacg

SEQ ID NO: 19 - DNA, 708 bp, Unknown
  Description of Unknown: Human Parechovirus sequence
tttgaaaggggtctcctagagagcttggccgtcgggccttataccccgacttgctgagtttctctaggagagcccttttcccagccctgaggcggctggtcaataaaagcctcaaacgtaactaacacctaagaagatcatgtaaaccctatgcctggtctccactattcgaaggcaacttgcaataagaagagtgggatcaagacgcttaaagcatagagacagttttcttttctaacccacatttgtgtggggtggcagatggcgtgccataactctaatagtgagataccacgcttgtggaccttatgctcacacagccatcctctagtaagtttgtgagacgtctggtgacgtgtgggaacttattggaaacaacattttgctgcaaagcatcctactgccagcggaaaaacacctggtaacaggtgcctctggggccaaaagccaaggtttaacagaccctttaggattggttctaaacctgagatgttgtggaagatatttagtacctgctgatctggtagttatgcaaacactagttgtaaggcccatgaaggatgcccagaaggtacccgtaggtaacaagtgacactatggatctgatttggggccagatacctctatcttggtgatctggttaaaaaacatctaatgggccaaacccgggggggatccccggtttcctcttattctatcaatgccact

SEQ ID NO: 20 - DNA, 508 bp, Unknown
  Description of Unknown: Crohivirus B sequence
gtataagagacaggtgtttgccttgtcttcggactggcatcttgggaccaaccccccttttccccagccatgggttaaatggcaataaaggacgtaacaactttgtaaccattaagctttgtaattttgtaaccactaagctttgtgcacataatgtaaccatcaagcttgttagtcccagcaggaggtttgcatgcttgtagccgaaatggggctcgaccccccatagtaggatacttgattttgcattccattgtggacctgcaaactctacacatagaggctttgtcttgcatctaaacacctgagtacagtgtgtacctagaccctatagtacgggaggaccgtttgtttcctcaataaccctacataataggctaggtgggcatgcccaatttgcaagatcccagactgggggtcggtctgggcagggttagatccctgttagctactgcctgatagggtggtgctcaaccatgtgtagtttaaattgagctgttcatatacc

SEQ ID NO: 21 - DNA, 248 bp, Unknown
  Description of Unknown: Picornaviridae sp. sequence
actgaagatcctacagtaactactgccccaatgaacgccacagatgggtctgctgatgactacctatcttagtgctagttgaggtttgaagtgagccggtttttagaagaaccagtttctgaacattatcatccccagcatctattctatacgcacaagatagatagtcatcagcagacacatctgtgctactgcttgatagagttgcggctggtcaacttagattggtataaccagttgagtggcaa

SEQ ID NO: 22 - DNA, 516 bp, Unknown
  Description of Unknown: Rosavirus M-7 sequence
tatgcatcactggacggcctaacctcggtcgtggcttcttgccgatttcagcgctaccaggctttctggtctcgccaggcgttgattagtaggtgcactgtctaagtgaagacagcagtgctctctgtgaaaagttgatgacactcttcaggtttgtagcgatcactcaaggctagcggatttccccgtgtggtaacacacgcctctaggcccagaaggcacggtgttgacagcaccccttgagtggctggtcttccccaccagcacctgatttgtggattcttcctagtaacggacaagcatggctgctcttaagcattcagtgcgtccggggctgaaggatgcccagaaggtacccgcaggtaacgataagctcactgtggatctgatctggggctgcgggctgggtgtctttccacccagccaaaacccgtaaaacggtagtcgcagttaaaaaacgtctaggccccacccccccagggatggggggttcccttaaaccctcacaagttcaac

SEQ ID NO: 23 - DNA, 478 bp, Unknown
  Description of Unknown: Shanbavirus A sequence
tgaaaagggggcgcagggtggtggtggttactaaatacccaccatcgccctgcacttcccttttcccctgtggctcagggtcacttagccccctctttgggttaccagtagttttctacccctgggcacagggttaactatgcaagacggaacaacaatctcttagtccccctcgccgatagtgggctcgacccccatgtgtaggagtggataagggacggagtgagccgatacggggaagagtgtgcggtcacaccttaattccatgagcgctgcgaagaaggaagctgtgaacaatggcgacctgaaccgtacacatggagctccacaggcatggtactcgttagactacgcagcctggttgggagtgggtataccctgggtgagccgccagtgaatgggagttcactggttaacacacactgcctgatagggtcagggcctcctgtccccgccgtaatgaggtagaccatatgcc

SEQ ID NO: 24 - DNA, 403 bp, Unknown
  Description of Unknown: Pasivirus A sequence
gcggctggatattctggccgtgcaactgcttttgaccagtggctctgggtaacttagccaaagtgtccttctccctttccctattatatgttttatggctttgtctggtcttgtttagtttatatataagatcctttccgccgatatagacctcgacagtctagtgtaggaggattggtgatattaatttgccccagaagagtgaccgtgacacatagaaaccatgagtacatgtgtatccgtggaggatcgcccgggactggattccatatcccattgccatcccaacaagcggagggtatacccactatgtgcacgtctgcagtgggagtctgcagatttagtcatactgcctgatagggtgtgggcctgcactctggggtactcaggctgtttatataat

SEQ ID NO: 25 - DNA, 404 bp, Unknown
  Description of Unknown: Pasivirus A sequence
gctggactttctggctgcgcaactgcttttaaccagtggctctgggttacttagccaaaaccccctttccccgtaccctagtttgtgtgtgtattattattttgttgttgttttgtaaatttttatataagatcctttccgccgatatagacctcgacagtctagtgtaggaggattggtgatattaatatgccccagaagagtgaccgtgacacatagaaaccatgagtacatgtgtatccgtggaggatcgcccgggactggattccatatcccattgccatcccaacaaacggagggtatacccgctatgtgcgcgtctacagtgggaatctgtagatttagtcatactgcctgatagggtgtgggcctgcactctggggtactcaggctgtttatataat

SEQ ID NO: 26 - DNA, 744 bp, Unknown
  Description of Unknown: Echovirus E14 sequence
ttaaaacagcctgtgggttgttcccatccacagggcccactgggcgccagcactctggtattgcggtaccttagtgcgcctgttttatatacccgtcccccaaacgtaacttagacgcatgtcaacgaagaccaatagtaagcgcagcacaccagctgtgttccggtcaagcacttctgttaccccggaccgagtatcaataagctactcacgtggctgaaggagaaaacgttcgttacccgaccaattacttcaagaaacctagtaacaccatgaaggttgcgcagtgtttcgctccgcacaaccccagtgtagatcaggtcgatgagtcaccgcattccccacgggtgaccgtggcggtggctgcgctggcggcctgcccatggggaaacccatgggacgcttcaatactgacatggtgcgaagagtctattgagctaattggtagtcctccggcccctgaatgcggctaatcctaactgcggagcagatacccacacaccagtgggcagtctgtcgtaacgggcaactctgcagcggaaccgactactttgggtgtccgtgtttctctttatccttatactggctgcttatggtgacaattgagagattgttaccatatagctattggattggccatccggtgacaaatagagcaattgtgtatttgtttgttggtttcgtgccattaaattacaaggttctaaacacccttaatcttattatagcattcaacacaacaaa

SEQ ID NO: 27 - DNA, 663 bp, Unknown
  Description of Unknown: Human Parechovirus sequence
gtacattagatgcgtcatctgcaactttagtcaataaattacctccaatgtcattaccaacattccctaccttttcactaacacctaagacaacaagtacctatgcctggtctccactattcgaaggcaacttgcaataagaagagtggaattaagacgcttaaagcatagagctagttatcttttctaacccacaaagttttgtggggtggcagatggcgtgccataactctattagtgagataccatgcttgtggatcttatgctcacacagccatcctctagtaagttgataaggtgtctggtgatatgtgggaactcacatgaaccattaatttaccgtaaggtatcctatagccagcggaatcacatctggtgacagatgcctctggggccgaaagccaaggtttaacagaccctataggattggtttcaaaacctgaattgatgtggattgtgtatagtacctgttgatctggtaacagtgtcaacactagttgtaaggcccacgaaggatgcccagaaggtacccgtaggtaacaagtgacactatggatctgatctggggccagctacctctatcatggtgagttggttaaaaaacgtctagtgggccaaacccaggggggatccctggtttccttttacctaatcaaagccact

SEQ ID NO: 28 - DNA, 744 bp, Unknown
  Description of Unknown: Aichi virus sequence
tttgaaaagggggtgggggggcctcggccccctcaccctcttttccggtggtctggtcccggaccaccgttactccattcagcttcttcggaacctgttcggaggaattaaacgggcacccatactccccccaccccccttttgtaactaagtatgtgtgctcgtgatcttgactcccacggaacggaccgatccgttggtgaacaaacagctaggtccacatcctcccttcccctgggagggcccccgccctcccacatcctccccccagcctgacgtatcacaggctgtgtgaagcccccgcgaaagctgctcacgtggcaattgtgggtccccccttcatcaagacaccaggtctttcctccttaaggctagccccggcgtgtgaattcacgttgggcaactagtggtgtcactgtgcgctcccaatctcggccgcggagtgctgttccccaagccaaacccctggcccttcactatgtgcctggcaagcatatctgagaaggtgttccgctgtggctgccaacctggtgacaggtgccccagtgtgcgtaaccttcttccgtctccggacggtagtgattggttaagatttggtgtaaggttcatgtgccaacgccctgtgcgggatgaaacctctactgccctaggaatgccaggcaggtaccccacctccgggtgggatctgagcctgggctaattgtctacgggtagtttcatttccaatccttttatgtcggagtc

SEQ ID NO: 29 - DNA, 734 bp, Unknown
  Description of Unknown: Hepatitis A virus sequence
ttcaagaggggtctccggagttttccggaacccctcttggaagtccatggtgaggggacttgatacctcaccgccgtttgcctaggctataggctaaatttccctttccctgtccttcccctatttccttttgttttgtttgtaaatattaattcctgcaggttcagggttctttaatctgtttctctataagaacactcaatttttcacgctttctgtctcctttcttccagggctctccccttgccctaggctctggccgttgcgcccggcggggtcaactccatgattagcatggagctgtaggagtctaaattggggacgcagatgtttgggacgtcgccttgcagtgttaacttggctttcatgaacctctttgatcttccacaaggggtaggctacgggtgaaacctcttaggctaatacttcaatgaagagatgccttggatagggtaacagcggcggatattggtgagttgttaagacaaaaaccattcaacgccggaggactggctctcatccagtggatgcattgagggaattgattgtcagggctgtctctaggtttaatctcagacctctctgtgcttagggcaaacactatttggccttaaatgggatcctgtgagagggggtccctccattgacagctggactgttctttggggccttatgtggtgtttgcctctgaggtactcaggggcatttaggtttttcctcattcttaaataata

SEQ ID NO: 30 - DNA, 638 bp, Unknown
  Description of Unknown: Phopivirus sequence
gggagtaaacctcaccaccgtttgccgtggtttacggctacctatttttggatgtaaatattaattcctgcaggttcaggtctcttgaattatgtccacgctagtggcactctcttacccataagtgacgccttagcggaacctttctacacttgatgtggttaggggttacattatttccctgggccttctttggccctttttcccctgcactatcattctttcttccgggctctcagcatgccaatgttccgaccggtgcgcccgccggggttaactccatggttagcatggagctgtaggccctaaaagtgctgacactggaactggactattgaagcatacactgttaactgaaacatgtaactccaatcgatcttctacaaggggtaggctacgggtgaaaccccttaggttaatactcatattgagagatacttctgataggttaaggttgctggataatggtgagtttaacgacaaaaaccattcaacagctgtgggccaacctcatcaggtagatgcttttggagccaagtgcgtaggggtgtgtgtggaaatgcttcagtggaaggtgccctcccgaaaggtcgtaggggtaatcaggggcagttaggtttccacaattacaatttgaa

SEQ ID NO: 31 - DNA, 743 bp, Unknown
  Description of Unknown: CVA10 sequence
gctcttccgatctgggttgttcccacccacagggcccactgggcgccagcactctgattccacggaatctttgtgcgcctgttttacaacccttcccaatttgtaacgtagaagcaatacacactactgatcaatagtaggcatggcgcgccagtcatgtcatgatcaagcacttctgttcccccggactgagtatcaatagactgctcacgcggttgaaggagaaaacgttcgttacccggctaactacttcgagaaacctagtagcaccatggaagctgcggagtgtttcgctcagcactttccccgtgtagatcaggtcgatgagtcactgcaatccccacgggcgaccgtggcagtggctgcgttggcggcctgcctatggggcaacccataggacgctctaatgtggacatggtgcgaagagtctattgagctagttagtagtcctccggcccctgaatgcggctaatcctaactgcggagcacatgccttcaacccaggaggtggtgtgtcgtaacgggtaactctgcagcggaaccgactactttgggtgtccgtgtttccttttatccttatattggctgcttatggtgacaatcacggaattgttgccatatagctattggattggccatccggtgtctaacagagctattgtatacctatttgttggatttactcccctatcatacaaatctctgaacactttgtgctttatactgaacttaaacacacgaaa

SEQ ID NO: 32 - DNA, 746 bp, Unknown
  Description of Unknown: Enterovirus C sequence
ttaaaacagctctggggttgttcccaccccagaggcccacgtggcggccagtacaccggtaccacggtacccttgtacgcctgttttatactcccctccccgtaaactagaagcacgaaacacaagttcaatagaagggggtacagaccagtaccaccacgaacaagcacttctgttcccccggtgaggtcacatagactgtccccacggtcaaaagtgactgatccgttatccgctcacgtacttcggaaagcctagtaccaccttggaatctacgatgcgttgcgctcagcactcgaccccggagtgtagcttaggctgatgagtctggacgttccccactggtgacagtggtccaggctgcgttggcggcctacctgtggtccaaaaccacaggacgctagtagtgaacaaggtgtgaagagcccactgagctacctgagaatcctccggcccctgaatgcggctaatcccaaccacggagcaggtaatcgcaaaccagcggtcagcctgtcgtaacgcgtaagtctgtggcggaaccgactactttgggtgtccgtgtttccttttatttttatggtggctgcttatggtgacaatcatagattgttatcataaagcaaattggattggccatccggagtgagctaaactatctatttctctgagtgttggattcgtttcacccacattctgaacaatcagcctcattagtgttaccctgttaataagacgatatcatcacg

SEQ ID NO: 33 - DNA, 726 bp, Unknown
  Description of Unknown: Enterovirus D sequence
ttaaaacagctctggggttgttcccaccccagaggcccacgtggcggctagtactccggtaccccggtacccttgtacgcctgttttatactccctttcccaagtaactttagaagaaataaactaatgttcaacaggagggggtacaaaccagtaccaccacgaacacacacttctgtttccccggtgaagttgcatagactgtacccacggttgaaagcgatgaatccgttacccgcttaggtacttcgagaagcctagtatcatcttggaatcttcgatgcgttgcgatcagcactctaccccgagtgtagcttgggtcgatgagtctggacaccccacaccggcgacgtggtccaggctgcgttggcggcctacccatggctagcaccatgggacgctagttgtgaacaaggtgcgaagagcctattgagctacctgagagtcctccggcccctgaatgcggctaatcccaaccacggagcaaatgctcacaatccagtgagtggtttgtcgtaatgcgcaagtctgtggcggaaccgactactttgggtgtccgtgtttccttttatttttattatggctgcttatggtgacaatctgagattgttatcatatagctattggattagccatccggtgatatcttgaaattttgccataactttttcacaaatcctacaacattacactacactttctcttgaataattgagacaactcata

SEQ ID NO: 34 - DNA, 737 bp, Unknown
  Description of Unknown: Enterovirus J sequence
ttaaaatagcctcagggttgttcccaccctgagggcccacgtggtgtagtactctggtattacggtacctttgtacgcctattttatacccccttccccaagtaatttagaagcaagcacaaaccagttcagtagtaagcagtacaatccagtactgtaatgaacaagtacttctgttaccccggaagggtctatcggtaagctgtacccacggctgaagaatgacctaccgttaaccggctacctacttcgagaagcctagtaatgccgttgaagttttattgacgttacgctcagcacactaccccgtgtgtagttttggctgatgagtcacggcactccccacgggcgaccgtggccgtggctgcgttggcggccaaccaaggagtgcaagctccttggacgtcatattacagacatggtgtgaagagcctattgagctaggtggtagtcctccggcccctgaatgcggctaatcctaactccggagcatatcggtgcgaaccagcacttggtgtgttgtaatacgtaagtctggagcggaaccgactactttgggtgtccgtgtttcctgttttaacttttatggctgcttatggtgacaatttaacattgttaccatatagctgttgggttggccatccggattttgttataaaaccatttcctcgtgccttgacctttaacacatttgtgaacttctttaaatcccttttattagtccttaaatactaaga

SEQ ID NO: 35 - DNA, 327 bp, Pegivirus sp.
aactgttgttgtagcaatgcgcatattgctacttcggtacgcctaattggtaggcgcccggccgaccggccccgcaagggcctagtaggacgtgtgacaatgccatgagggatcatgacactggggtgagcggaggcagcaccgaagtcgggtgaactcgactcccagtgcgaccacctggcttggtcgttcatggagggcatgcccacgggaacgctgatcgtgcaaagggatgggtccctgcactggtgccatgcgcggcaccactccgtacagcctgatagggtggcggcgggcccccccagtgtgacgtccgtggagcgcaac

SEQ ID NO: 36 - DNA, 281 bp, Unknown
  Description of Unknown: GB virus C sequence
tgacgtgggggggttgattttccccccccggcactgggtgcaagccccagaaaccgacgcctatctaagtagacgcaatgactcggcgccgactcggcgaccggccaaaaggtggtggatgggtgatgacagggttggtaggtcgtaaatcccggtcatcctggtagccactataggtgggtcttaagagaaggtcaagattcctcttacgcctgcggcgagaccgcgcacggtccacaggtgttggccctaccggtgtgaataagggcccgacatcaggc

SEQ ID NO: 37 - DNA, 459 bp, Unknown
  Description of Unknown: GB virus C sequence
gacgtgggggggttgatcccccccctttggcactgggtgcaagccccagaaaccgacgcctatttaaacagacgttaagaaccggcgccgacccggcgaccggccaaaaggtggtggatgggtgatgccagggttggtaggtcgtaaatcccggtcatcttggtagccactataggtgggtcttaagggttggttaaggtccctctggcgcttgtggcgagaaagcgcacggtccacaggtgttggccctaccggtgtgaataagggcccgacgtcaggctcgtcgttaaaccgagcccactacccacctgggcaaacaacgcccacgtacggtccacgtcgcccttcaatgtctctcttgaccaataggcttagccggcgagttgacaaggaccagtgggggctgggcggtaggggaaggacccctgccgctgcccttcccggtggagtgggaaatgc

SEQ ID NO: 38 - DNA, 350 bp, Unknown
  Description of Unknown: GB virus C sequence
tgacgtgggggggttgatccgccccccccggcactcggtgcaagccccataaaccgacgcctatctaagtagacgcaatgactcggcgccgactcggcgaccggccaaaaggtggtggatgggtggtgacagggttggtaggtcgtaaatcccggtcatcctggtagccactataggtgggtcttaagagaaggtcaagactcctcttgtgcctgcggcgagaccgcgcacggtccacaggtgctggccctaccggtgtgaataagggcccgacgtcaggctcgtcgttaaaccgagcccgtcacccacctgggcaaacgacgcccacgtacggtccacgtcgcccttca

SEQ ID NO: 39 - DNA, 318 bp, Pegivirus A
tgtagcaatgcgcatattgctacttcggtacgcctaattggtaggcgcccggccgaccggccccgcaagggcctagtaggacgtgtgacaatgccatgcgggatcatgacactggggtgagcggaggcagcaccgaagtcgggtgaactcgactcccagtgcgaccacctggcttggtcgttcatggagggcatgcccacgggaacgctgatcgtgcaaagggatgggtccctgcactggtgccatgcgcggcaccactccgtacagcctgatagggtggcggcgggcccccccagtgtgacgtccgtggagcgcaac

SEQ ID NO: 40 - DNA, 399 bp, Unknown
  Description of Unknown: Pasivirus A sequence
attttctggccgtgtagctgcttttgaccagtggctctgggttacttagccaaatcccccttccttcacccttttaaatttgatggtctgtgttgtttgttttgtcttgtctaaataatatataagatccttcccgccgatacagacctcgacagtctggtgtaggagggttggtgttattaatttgccccagaagagtgaccgtgacacatagaaaccatgagtacatgtgtatccgtggaggatcgcccgggactggattccatatcccattgccatcccaacaagcggagggtatacccactatgtgcgcgtttgcagtgggaatctgcaaatttagtcatactgcctgatagggtgtgggcctgcactctggggtactcaggctgttcatataat

SEQ ID NO: 41 - DNA, 430 bp, Sapelovirus sp.
cccctccacccttaaggtggttgtatcccacataccccaccctcccttccaaagtggacggacaactggattttgactaacggcaagtctgaatggtatgatttggatacgtttaaacggcagtagcgtggcgagctatggaaaaatcgcaattgtcgatagccatgttagtgacgcgcttcggcgtgctcctttggtgattcggcgactggttacaggagagtaggcagtgagctatgggcaaacctctacagtattacttagagggaatgtgcaattgagacttgacgagcgtctctttgagatgtggcgcatgctcttggcattaccatagtgagcttccaggttgggaaacctggactgggcctatactacctgatagggtcgcggctggccgcctgtaactagtatagtcagttgaaaccccccc

SEQ ID NO: 42 - DNA, 504 bp, Rosavirus B
gtctctttagtgtctatgcttcagagagcggtgaactgacaccgttgcttcttgcacagcccttcgtgccggtctttccggttctcgacagcgttgggcatcatggctagttaggctaagatagtggatgatctagtgaacagttttggattgtttggagttttgtagcgatgctagtagtgtgtgtggacctccccacgtggtaacacgtgccccacaggccaaaagccaaggtgttgaaagcacccctactagtcccagactcacccatctgggaactcctctcatgaaaaatcttagtaacttttgattcggctattcatcaacctctctagtcaagggctgaaggatgcccggaaggtacccgcaggtaacgataagctcactgtggatctgatccggggctttggtgcgaccgtctgtccggcgtagccagagttaaaaaacgtctaggcccttccaccccaagggattggggtttccccaatcatttgaaagttcact

SEQ ID NO: 43 - DNA, 532 bp, Unknown
  Description of Unknown: Bakunsa virus sequence
ttttgaacgccacctcggagcgatatccggggaccccctcccctttttccttcctaccttcttcccaaatttccctcttcccttgttattttggtttggatttcctggacatgactcggacggatctatctcatttgctttgtgtctgctccaccagtggcatggtcgaaagatcatcaacactggacgtgtactgtaatggccaaacgtgcccacaggggaaaccatgccggtcgctgtagcggcgggtggacgtggtggacccctctccctgctcataaactttgggtaggtgaagggttcaagcgacgcttgccgtgagggcgcatccggatggtgggaaccaacaaactaggctgtaatggccgacctcaggtggatgagctagggctgctgcaccaaaagggactcgattcgatatcccggcctggtagcctagtgcagtggactcgtagttgggaatctacgactggcctagtacagggtgatagccccgtttcccacgcccacctgttgtagggacacccccccc

SEQ ID NO: 44 - DNA, 494 bp, Tremovirus A
tttgaaagaggcctccggagtgtccggaggctctctttcgacccaacccatactggggggtgtgtgggaccgtacctggagtgcacggtatatatgcattcccgcatggcaagggcgtgctaccttgccccttgacgcatggtatgcgtcatcatttgccttggttaagccccatagaaacgaggcgtcacgtgccgaaaatccctttgcgtttcacagaaccatcctaaccatgggtgtagtatgggaatcgtgtatggggatgattaggatctctcgtagagggataggtgtgccattcaaatccagggagtactctggctctgacattgggacatttgatgtaaccggacctggttcagtatccgggttgtcctgtattgttacggtgtatccgtcttggcacactgaaagggtatttttgggtaatcctttcctactgcctgatagggtggcgtgcccggccacgagagattaagggtagcaatttaaac

SEQ ID NO: 45 - DNA, 378 bp, Unknown
  Description of Unknown: Swine Pasivirus 1 sequence
gcttttgaccagtggctctgggttacttagccaagtccctttctcttattttcactagtttatgttgtgtgttgtctgttttgttttgtttaaattgtatacaagatccttcccgccgacacagacctcgacagtctggtgtaggagggttggtgatattaatttgccccaaaagagtgaccgtgatacgtggaaaccatgagtacatgtgtatccgtggaggatcgcccgggactggattccatatcccattgccatcccaacaaacggagggtatacccaccacgtgcgcgtttgcagtgggaatctgcaaatttagtcatactgcctgatagggtgtgggcctgcactttggggtactcaggctgttcatataat

SEQ ID NO: 46 - DNA, 319 bp, Unknown
  Description of Unknown: Parechovirus-like virus PLV-CHN sequence
acatggggtatgttgtctgtcctgttttgttgaaacaatatataagatcctttccgccgatatagacctcgacagtctagtgtaggaggattggtgatagtaacttgccccagaagagtgaccgtgacacatagaaaccatgagtacatgtgtatccgtggaggatcgcccgggactggattccatatcccattgccatcccaacaaacggagggtatacccactatgtgcgcgtttgcagtgggagcctgcaaatttagtcatactgcctgatagggtgtgggcctgcactctggggtactcaggctgtttatataat

SEQ ID NO: 47 - DNA, 420 bp, Unknown
  Description of Unknown: Pasivirus A sequence
tgaaaaagtggttgtgcagctggattttccggctgtgcaactgcttttgaccagtggctctgggttacttagccaaattcctttcccttatccctattggtttgtgttgtgtgttgtttgttttgttttgtcttaactatatacaagatccttcccgccgatacagacctcgacagtctggtgtaggagggttggtgttattaatttgccccaaaagagtgaccgtgacacgtggaaaccatgagtacatgtgtatccgtggaggatcgcccgggactggattccatatcccattgccatcccaacaaacggagggtatacccaccacgtgcgcgtttgcagtgggaatctgcaaatttagtcatactgcctgatagggtgtgggcctgcactttggggtactcaggctgtttatataat

SEQ ID NO: 48 - DNA, 373 bp, Sicinivirus sp.
gtgtcattaaggtgtgtttggaagttcgaattagctggtttgtggtgattagtagaccccctggaggtacccaattcggatctgaccagggacccgtgactataccgctccggtaattcgggtttaaaacaatgaacgtcaccacacaattacttttctcattttattttcatcattgtcttcctatttaccgattacactcgatttccttggatgttcctggagatttccctggttacctggaccctcattattgttgttgtttcacccagcgagctgtcccaattgcttattatttgcgcttacaacttcgtcctaatatttttctggttgatcgggttgattgagctcccgggctatcctgccattcaac

SEQ ID NO: 49 - DNA, 280 bp, Hepacivirus K
gggaacaatggtccgtccgcggaacgactctagccatgagtctagtacgagtgcgtgccacccattagcacaaaaaccactgactgagccacacccctcccggaatcctgagtacaggacattcgctcggacgacgcatgagcctccatgccgagaaaattgggtatacccacgggtaaggggtggccacccagcgggaatctgggggctggtcactgactatggtacagcctgatagggtgctgccgcagcgtcagtggtatgcggctgttcatggaac

SEQ ID NO: 50 - DNA, 384 bp, Hepacivirus A
acctccgtgctaggcacggtgcgttgtcagcgttttgcgcttgcatgcgctacacgcgtcgtccaacgcggagggaacttcacatcaccatgtgtcactccccctatggagggttccaccccgcttacacggaaatgggttaaccatacccaaagtacgggtatgcgggtcctcctagggcccccccggcaggtcgagggagctggaattcgtgaattcgtgagtacacgaaaatcgcggcttgaacgtctttgaccttcggagccgaaatttgggcgtgccccacgaaggaaggcgggggcggtgttgggccgccgccccctttatcccacggtctgataggatgcttgcgagggcacctgccggtctcgtagaccataggac

SEQ ID NO: 51 - DNA, 384 bp, Unknown
  Description of Unknown: Bovine viral diarrhea virus 1 sequence
gtatacgagaatttgcctaggacctcgtttacaatatgggcaatctaaaattataattaggcctaagggacaaatcctcctcagcgaaggccgaaaagaggctagccatgcccttagtaggactagcaaaataaggggggtagcaacagtggtgagttcgttggatggctgaagccctgagtacagggtagtcgtcagtggttcgacgcttcggaggacaagcctcgagataccacgtggacgagggcatgcccacagcacatcttaacctggacgggggtcgttcaggtgaaaacggtttaaccaaccgctacgaatacagcctgatagggtgctgcagaggcccactgtattgctactgaaaatctctgctgtacatggcac

SEQ ID NO: 52 - DNA, 372 bp, Unknown
  Description of Unknown: Border Disease virus sequence
gtatacgggagtagctcatgcccgtatacaaaattggatattccaaaactcgattgggttagggagccctcctagcgacggccgaaccgtgttaaccatacacgtagtaggactagcagacgggaggactagccatcgtggtgagatccctgagcagtctaaatcctgagtacaggatagtcgtcagtagttcaacgcaggcacggttctgccttgagatgctacgtggacgagggcatgcccaagacttgctttaatctcggcgggggtcgccgaggtgaaaacacctaacggtgttggggttacagcctgatagggtgctgcagaggcccacgaataggctagtataaaaatctctgctgtacatggcac

SEQ ID NO: 53 - DNA, 388 bp, Unknown
  Description of Unknown: Bovine viral diarrhea virus 2 sequence
gtatacgagattagctaaagtactcgtatatggattggacgtcaacaaatttttaattggcaacgtagggaaccttcccctcagcgaaggccgaaaagaggctagccatgccctttagtaggactagcaaaagtagggggactagcggtagcagtgagttcgttggatggccgaacccctgagtacaggggagtcgtcaatggttcgacactccattagtcgaggagtctcgagatgccatgtggacgagggcatgcccacggcacatcttaacccatgcgggggttgcatgggtgaaagcgctaatcgtggcgttatggacacagcctgatagggtgtagcagagacctgctattccgctagtaaaaaactctgctgtacatggcac

SEQ ID NO: 54 - DNA, 373 bp, Unknown
  Description of Unknown: Classical swine fever virus sequence
gtatacgaggttagttcattctcgtatgcattattggacaaatcaaaatttcaatttggttcagggcctccctccagcgacggccgaactgggctagccatgcccatagtaggactagcaaacggagggactagccgtagtggcgagctccctgggtgttctaagtcctgagtacaggacagtcgtcagtagttcgacgtgagcagaagcccacctcgagatgctatgtggacgagggcatgcccaagacgcaccttaaccctagcgggggtcgctagggtgaaatcacaccacgtgatgggagtccgacctgatagggtgctgcagaggctcactattaggctagtataaaaatctctgctgtacatggcac

SEQ ID NO: 55 - DNA, 191 bp, Unknown
  Description of Unknown: Human blood-associated dicistrovirus sequence
aaaaccgaccccagagatcagaaagtcgttgacgcgatcttttattagaggacgttgcgctggcgcgagctttaattagcagacgccaaaaataaacaacaaaatgctgatcgcgagacttaattgtcagacgattggccaaatccgatgtgatctttgctgctcccagattgccgaaataggagtagtag

SEQ ID NO: 56 - DNA, 438 bp, Unknown
  Description of Unknown: Hubei Picorna-like virus sequence
ccccaaaaccccccccttaaactcaacactgtagtggattcattttccgttgcaaaacaaaacattactacccgcatttatgtaggctctgtgttttctatgcgaccgttacattaatctctactctgacccactagtttataaaaccgaagacctgaatgaaacgattttccttcttttcaacctctaacgaacctctgacggcttgagaaacctgaagttagtaattatgtttaaaagaaaggaaagtcaaacgcgatgactcttacatccctattccataccgttgctccacaatgtgagcgatgcgaggtcgggactgcagtattaggggaacgagctacatggagagttaattatctctcccctcctacgggagtctcatgtgagctgtagaaagcggttggcacctctcgttacctcgcctgtacatgatcc

SEQ ID NO: 57 - DNA, 193 bp, Cricket paralysis virus
aaaagcaaaaatgtgatcttgcttgtaaatacaattttgagaggttaataaattacaagtagtgctatttttgtatttaggttagctatttagctttacgttccaggatgcctagtggcagccccacaatatccaggaagccctctctgcggtttttcagattaggtagtcgaaaaacctaagaaatttacct

SEQ ID NO: 58 - DNA, 752 bp, Unknown
  Description of Unknown: Salivirus A sequence
tttcctcctttcgaccgccttacggcaggcgggtccgcggacggcttcggcctacccgcgacaagaatgccgtcatctgtccttatcacccatattctttcccttcccccgcaaccatcacgcttactcgcgcacgtgttgagtggcacgtgcgttgtccaaacagttacactcacacccttggggcgggtttgtcccgccctcgggttcctcgcggaaccctccctcttctctctccctttctatccgccttcactttccataactacagtgctttggtaggtaagcatcctgaccccccgcggaagctgccaacgtggcaactgtggggatccaggcaggttatcaaaggcacccggtctttccgccttcaggagtatccctgccggtgaattccgacagggctctgcttggtgccaacctcccccaaatgcgcgctgcgggagtgctcttccccaactcatcttagtaacctctcatgtgtgtgcttggtcagcatatctgaggcgacgttccgctgtcccagaccagtccagcaatggacgggccagtgtgcgtagtcgctttccggtttcccggcgcatgtttggcgaaacgctgaggtaaggttggtgtgcccaatgcccgtaatttggtgacacctcaagaccacccaggaatgccagggaggtaccccacttcggtgggatctgaccctgggctaattgtctacggtggttcttcttgcttccacttctcttttttctggcatg

SEQ ID NO: 59 - DNA, 708 bp, Unknown
  Description of Unknown: Salivirus A sequence
tatggcaggcgggcttgtggacggcttcggcccacccacagcaagaatgccatcatctgtcctcacccccatgtttcccctttctttccctgcaaccgttacgcttactcgcaggtgcatttgagtggtgcacgtgttgaataaacagctacactcacatgggggcgggttttcccgccctgcggcctctcgcgaggcccacccctccccttcctcccataactacagtgctttggtaggtaagcatcctgatcccccgcggaagctgctcacgtggcaactgtggggacccagacaggttatcaaaggcacccggtctttccgccttcaggagtatccctgctagtgaattctagtagggctctgcttggtgccaacctcccccaaatgcgcgctgcgggagtgctcttccccaactcaccctagtatcctctcatgtgtgtgcttggtcagcatatctgagacgatgttccgctgtcccagaccagtccagtaatggacgggccagtgtgcgtagtcgtcttccggcttttccggcgcatgtttggtgaaccggtggggtaaggttggtgtgcccaacgcccgtactttggtgatacctcaagaccacccaggaatgccagggaggtaccccgcttcacagcgggatctgaccctgggctaattgtctacggtggttcttcttgcttccacttctttctactgttc

SEQ ID NO: 60 - DNA, 718 bp, Unknown
  Description of Unknown: Salivirus A sequence
tttcgaccgccttatggcaggcgggcttgtggacggcttcggcccacccacagcaagaatgccatcatctgtcctcacccccatttctcccctccttcccctgcaaccattacgcttactcgcatgtgcattgagtggtgcacgtgttgaacaaacagctacactcacgtgggggcgggttttcccgcccttcggcctctcgcgaggcccacccttccccttcctcccataactacagtgctttggtaggtaagcatcctgatcccccgcggaagctgctcgcgtggcaactgtggggacccagacaggttatcaaaggcacccggtctttccgcctccaggagtatccctgctagtgaattctagtggggctctgcttggtgccaacctcccccaaatgcgcgctgcgggagtgctcttccccaactcaccctagtatcctctcatgtgtgtgcttggtcagcatatctgagacgatgttccgctgtcccagaccagtccagcaatggacgggccagtgtgcgtagtcgtcttccggcttgtccggcgcatgtttggtgaaccggtggggtaaggttggtgtgcccaacgcccgtactttggtgacaactcaagaccacccaggaatgccagggaggtaccccgcctcacggcgggatctgaccctgggctaattgtctacggtggttcttcttgcttccatttctttcttctgttc

SEQ ID NO: 61 - DNA, 699 bp, Unknown
  Description of Unknown: Salivirus A sequence
tatggcaggcgggcttgtggacggtttcggcccacccacagcaagaatgccatcatctgtcctcacccccaattttccctttcttcccctgcaatcatcacgcttactcgcatgtgcattgagtggtgcatgtgttgaacaaacagctacactcacatgggggcgggttttcccgccctacggcctctcgcgaggcccacccttcccctccccttataactacagtgctttggcaggtaagcatcctgatcccccgcggaagctgctcacgtggcaactgtggggacccagacaggttatcaaaggcacccggtctttccgccttcaggagcatccccactagtgaattctagtggggctctgcttggtgccaacctcccccaaatgcgcgctgcgggagtgctcttccccaacccatcctagtatcctctcatgtgtgtgcttggtcagcatatctgagacgacgttccgctgtcccagaccagtccagtaatggacgggccagtgtgcgtagtcgtcttccggcttgtccggcgcatgtttggtgaaccggtggggtaaggttggtgtgcccaacgcccgtactttggtgacacctcaagaccacccaggaatgccagggaggtaccccgcctcacggcgggatctgaccctgggctaattgtctacggtggttcttcttgcttccacttctttctt

SEQ ID NO: 62 - DNA, 624 bp, Unknown
  Description of Unknown: Salivirus A sequence
ttctcctgcaaccattacgcttaatcgcatgtgcattgagtggtgcatgtgttgaacaaacagctacaatcacatgggggcgggttttcccgccccacggcttctcgcgaggcccatccctcccttttctcccataactacagtgctttggtaggtaagcatcccgatctcccgcggaagctgctcacgtggcaactgtggggacccagacaggttatcaaaggcacccggtctttccgccttcaggagtatccctgctagcgaattctagtagggctctgcttggtgccaacctctcccaaatgcgcgctgcgggagtgctcttccccaaatcaccccagtatcctctcatgtgtgtgcctggtcagcatatctgagacgatgttccgctgtcccagaccagtccagtaatggacgggccagtgtgcgtagtcgtcctccggcttgtccggcgcatgtttggtgaaccggtggggtaaggttggtgtgcccaacgcccgtaatcaggggatacctcaaggcacccaggaatgccagggaggtatcccgcctcacagcgggatctgaccctggggtaaatgtctgcggggggtcctcttggcccaattctcagtaattttcagg

SEQ ID NO: 63 - DNA, 650 bp, Unknown
  Description of Unknown: Salivirus A sequence
tctgtcctcaccccatcttcccttctttcctgcaccgttacgcttactcgcatgtgcattgagtggtgcacgtgcttgaacaaacagctacactcacatgggggcgggttttcccgccctgcggcctctcgcgaggcccacccctccccttcctcccataactacagtgctttggtaggtaagcatcctgatcccccgcggaagctgctcacgtggcaactgtggggacccagacaggttatcaaaggcacccggtctttccgccttcaggagtatccctgctagtgaattctagtagggctctgcttggtgccaacctcccccaaatgcgcgctgcgggagtgctcttccccaactcaccctagtatcctctcatgtgtgtgcttggtcagcatatctgagacgatgttccgctgtcccagaccagtccagtaatggacgggccagtgtgcgtagtcgtcttccggcttgtccggcgcatgtttggtgaaccggtggggtaaggttggtgtgcccaacgcccgtactttggtgatacctcaagaccacccaggaatgccagggaggtaccccgcttcacagcgggatctgaccctgggctaattgtctacggtggttcttcttgcttccacttctttctactgttcatg

SEQ ID NO: 64 - DNA, 730 bp, Unknown; identical to SEQ ID NO: 17
  Description of Unknown: Salivirus FHB sequence

SEQ ID NO: 65 - DNA, 741 bp, Unknown
  Description of Unknown: CVB3 sequence
ttaaaacagcctgtgggttgatcccacccacaggcccattgggcgctagcactctggtatcacggtacctttgtgcgcctgttttataccccctcccccaactgtaacttagaagtaacacacaccgatcaacagtcagcgtggcacaccagccacgttttgatcaagcacttctgttaccccggactgagtatcaatagactgctcacgcggttgaaggagaaagcgttcgttatccggccaactacttcgaaaaacctagtaacaccgtggaagttgcagagtgtttcgctcagcactaccccagtgtagatcaggtcgatgagtcaccgcattccccacgggcgaccgtggcggtggctgcgttggcggcctgcccatggggaaacccatgggacgctctaatacagacatggtgcgaagagtctattgagctagttggtagtcctccggcccctgaatgcggctaatcctaactgcggagcacacaccctcaagccagagggcagtgtgtcgtaacgggcaactctgcagcggaaccgactactttgggtgtccgtgtttcattttattcctatactggctgcttatggtgacaattgagagatcgttaccatatagctattggattggccatccggtgactaatagagctattatatatccctttgttgggtttataccacttagcttgaaagaggttaaaacattacaattcattgttaagttgaatacagcaaa

SEQ ID NO: 66 - DNA, 741 bp, Unknown
  Description of Unknown: CVB1 sequence
ttaaaacagcctgtgggttgttcccacccacaggcccattgggcgctagcactctggtatcacggtacctttgtgcgcctgttttacatcccctccccaaattgtaatttagaagtttcacacaccgatcattagcaagcgtggcacaccagccatgttttgatcaagcacttctgttaccccggactgagtatcaatagaccgctaacgcggttgaaggagaaaacgttcgttacccggccaactacttcgaaaaacctagtaacaccatggaagttgcggagtgtttcgctcagcactaccccagtgtagatcaggtcgatgagtcaccgcgttccccacgggcgaccgtggcggtggctgcgttggcggcctgcctacggggaaacccgtaggacgctctaatacagacatggtgcgaagagtctattgagctagttggtaatcctccggcccctgaatgcggctaatcctaactgcggagcacataccctcaaaccagggggcagtgtgtcgtaacgggcaactctgcagcggaaccgactactttgggtgtccgtgtttcattttattcctatactggctgcttatggtgacaattgacaggttgttaccatatagttattggattggccatccggtgactaacagagcaattatatatctctttgttgggtttataccacttagcttgaaagaggttaaaacactacatctcatcattaaactaaatacaacaaa

SEQ ID NO: 67 - DNA, 742 bp, Unknown
  Description of Unknown: Echovirus 7 sequence
ttaaaacagcctgtgggttgttcccacccacagggcccattgggcgtcagcaccctggtatcacggtacctttgtgcgcctgttttatatcccttcccccaattgtaacttagaagaaacacacaccgatcaacagcaagcgtggcacaccagccatgttttggtcaagcacttctgttaccccggactgagtatcaatagactgctcacgcggttgaaggagaaagcgtccgttatccggccagctacttcgagaaacctagtaacaccatggaagttgcggagtgtttcgctcagcactaccccagtgtagatcaggtcgatgagtcaccgctttccccacgggcgaccgtggcggtggctgcgttggcggcctgcctatgggggaacccataggacgctctaatacagacatggtgcgaagagtctattgagctagctggtattcctccggcccctgaatgcggctaatcctaactgtggagcacatgcccctaatccaaggggtagtgtgtcgtaatgagcaattccgcagcggaaccgactactttgggtgtccgtgtttcctcttattcttgtactggctgcttatggtgacaattgagagattgttaccatatagctattggattggccatccggtgactaatagagctattgtgtatctctttgttggatttgtaccacttaatttgaaagaaatcaggacactacgctacattttactattgaacaccgcaaa

SEQ ID NO: 68 - DNA, 743 bp, Unknown
  Description of Unknown: CVB5 sequence
ttaaaacagcctgtgggttgtacccacccacagggcccactgggcgctagcactctggtatcacggtacctttgtgcgcctgttttatgcccccttcccccaattgaaacttagaagttacacacaccgatcaacagcgggcgtggcataccagccgcgtcttgatcaagcactcctgtttccccggaccgagtatcaatagactgctcacgcggttgaaggagaaaacgttcgttacccggctaactacttcgagaaacctagtagcatcatgaaagttgcgaagcgtttcgctcagcacatccccagtgtagatcaggtcgatgagtcaccgcattccccacgggcgaccgtggcggtggctgcgttggcggcctgcctacggggcaacccgtaggacgcttcaatacagacatggtgcgaagagtcgattgagctagttagtagtcctccggcccctgaatccggctaatcctaactgcggagcacataccctcaacccagggggcattgtgtcgtaacgggtaactctgcagcggaaccgactactttgggtgtccgtgtttccttttattcttataatggctgcttatggtgacaattgaaagattgttaccatatagctattggattggccatccggtgtctaacagagctattatatacctctttgttggatttgtaccacttgatctaaaggaagtcaagacactacaattcatcatacaattgaacacagcaaa

SEQ ID NO: 69 - DNA, 743 bp, Unknown
  Description of Unknown: Enterovirus A71 sequence
ttaaaacagcctgtgggttgcacccactcacagggcccactgggcgcaagcactctggcacttcggtacctttgtgcgcctgttttatatcccctcccccaatgaaatttagaagcagcaaaccccgatcaatagcaggcataacgctccagttatgtcttgatcaagcacttctgtttccccggactgagtatcaatagactgctcacgcggttgaaggagaaaacgttcgttatccggctaactacttcggaaagcctagtaacaccatggaagttgcggagagtttcgttcagcacttccccagtgtagatcaggtcgatgagtcaccgcattccccacgggcgaccgtggcggtggctgcgttggcggcctgcccatggggtaacccatgggacgctctaatacggacatggtgtgaagagtctactgagctagttagtagtcctccggcccctgaatgcggctaatcccaactgcggagcacacgcccacaagccagtgggtagtgtgtcgtaacgggcaactctgcagcggaaccgactactttgggtgtccgtgtttccttttattcttatgttggctgcttatggtgacaattaaagagttgttaccatatagctattggattggccatccggtgtgcaacagagcgatcgtttacctatttattggttttgtaccattgacactgaagtctgtgatcacccttaattttatcttaaccctcaacacagccaaac

SEQ ID NO: 70 - DNA, 742 bp, Unknown
  Description of Unknown: CVA3 sequence
ttaaaacagcctgtgggttgtacccacccacagggcccactgggcgctagcacactggtattacggtacctttgtgcgcctgttttataccccccccaacctcgaaacttagaagtaaagcaaacccgatcaatagcaggtgcggcgcaccagtcgcatcttgatcaagcacttctgtaaccccggaccgagtatcaatagactgctcacgcggttgaaggagaaaacgttcgttacccggctaactacttcgagaaacccagtagcatcatgaaagttgcagagtgtttcgctcagcactacccccgtgtagatcaggccgatgagtcaccgcacttccccacgggcgaccgtggcggtggctgcgttggcggcctgcctatggggcaacccataggacgctctaatacggacatggtgcgaagagtctattgagctagttagtagtcctccggcccctgaatgcggctaatcctaactgcggagcacatacccttaatccaaagggcagtgtgtcgtaacgggtaactctgcagcggaaccgactactttgggtgtccgtgtttccttttaatttttactggctgcttatggtgacaattgaggaattgttgccatatagctattggattggccatccggtgactaacagagctattgtgttccaatttgttggatttaccccgctcacactcacagtcgtaagaacccttcattacgtgttatttctcaactcaagaaa

SEQ ID NO: 71 - DNA, 745 bp, Unknown
  Description of Unknown: CVA12 sequence
ttaaaacagcctgtgggttgtacccacccacagggcccactgggcgctagcactctggtactacggtacctttgtgtgcctgttttaagcccctaccccccactcgtaacttagaaggcttctcacactcgatcaatagtaggtgtggcacgccagtcacaccgtgatcaagcacttctgttaccccggtctgagtaccaataagctgctaacgcggctgaaggggaaaacgatcgttatccggctaactacttcgagaaacccagtaccaccatgaacgttgcagggtgtttcgctcggcacaaccccagtgtagatcaggtcgatgagtcaccgtattccccacgggcgaccgtggcggtggctgcgttggcggcctgcccatggggtgacccatgggacgctctaatactgacatggtgcgaagagtctattgagctagttagtagtcctccggcccctgaatgcggctaatcctaactgcggagcacatacccttaatccaaagggcagtgtgtcgtaacgggcaactctgcagcggaaccgactactttgggtgtccgtgtttccttttattcttacattggctgcttatggtgacaattgaaaagttgttaccatatagctattggattggccatccggtgacaaatagagctattgtatatctttttgttggttacgtaccccttaattacaaagtggtttcaactttgaaatacatcctaacactaaattgtagaaa

SEQ ID NO: 72 - DNA, 742 bp, Unknown
  Description of Unknown: Echovirus E24 sequence
ttaaaacagcctgtgggttgcacccacccacagggcccacagggcgctagcactctggtatcacggtacctttgtgcgcctgttttattaccccttccccaattgaaaattagaagcaatgcacaccgatcaacagcaggcgtggcgcaccagtcacgtctcgatcaagcacttctgtttccccggaccgagtatcaatagactgctcacgcggttgaaggagaaagtgttcgttatccggctaaccacttcgagaaacccagtaacaccatgaaagttgcagggtgtttcgctcagcacttccccagtgtagatcaggtcgatgagtcaccgcgttccccacgggcgaccgtggcggtggctgcgttggcggcctgcctatgggttaacccataggacgctctaatacagacatggtgcgaagagtttattgagctggttagtatccctccggcccctgaatgcggctaatcctaactgcggagcacgtgcctccaatccagggggttgcatgtcgtaacgggtaactctgcagcggaaccgactactttgggtgtccgtgtttccttttattcttatactggctgcttatggtgacaatcgaggaattgttaccatatagctattggattggccatccggtgtctaacagagcgattatatacctctttgttggatttatgcagctcaataccaccaactttaacacattgaaatatatcttaaagttaaacacagcaaa

SEQ ID NO: 73 - DNA, 240 bp, Anabaena sp.
gaagaaattctttaagtggatgctctcaaactcagggaaacctaaatctagttatagacaaggcaatcctgagccaagccgaagtagtaattagtaagttaacaatagatgacttacaactaatcggaaggtgcagagactcgacgggagctaccctaacgtcaagacgagggtaaagagagagtccaattctcaaagccaataggcagtagcgaaagctgcaagagaatgaaaatccgt

SEQ ID NO: 74 - DNA, 239 bp, Anabaena sp.
aagaaattctttaagtggatgctctcaaactcagggaaacctaaatctagttatagacaaggcaatcctgagccaagccgaagtagtaattagtaagttaacaatagatgacttacaactaatcggaaggtgcagagactcgacgggagctaccctaacgtcaagacgagggtaaagagagagtccaattctcaaagccaataggcagtagcgaaagctgcaagagaatgaaaatccgt

SEQ ID NO: 75 - DNA, 238 bp, Anabaena sp.
agaaattctttaagtggatgctctcaaactcagggaaacctaaatctagttatagacaaggcaatcctgagccaagccgaagtagtaattagtaagttaacaatagatgacttacaactaatcggaaggtgcagagactcgacgggagctaccctaacgtcaagacgagggtaaagagagagtccaattctcaaagccaataggcagtagcgaaagctgcaagagaatgaaaatccgt

SEQ ID NO: 76 - DNA, 190 bp, Anabaena sp.
gttatagacaaggcaatcctgagccaagccgaagtagtaattagtaagttaacaatagatgacttacaactaatcggaaggtgcagagactcgacgggagctaccctaacgtcaagacgagggtaaagagagagtccaattctcaaagccaataggcagtagcgaaagctgcaagagaatgaaaatccgt

SEQ ID NO: 77 - DNA, 189 bp, Anabaena sp.
ttatagacaaggcaatcctgagccaagccgaagtagtaattagtaagttaacaatagatgacttacaactaatcggaaggtgcagagactcgacgggagctaccctaacgtcaagacgagggtaaagagagagtccaattctcaaagccaataggcagtagcgaaagctgcaagagaatgaaaatccgt

SEQ ID NO: 78 - DNA, 188 bp, Anabaena sp.
tatagacaaggcaatcctgagccaagccgaagtagtaattagtaagttaacaatagatgacttacaactaatcggaaggtgcagagactcgacgggagctaccctaacgtcaagacgagggtaaagagagagtccaattctcaaagccaataggcagtagcgaaagctgcaagagaatgaaaatccgt

SEQ ID NO: 79 - DNA, 187 bp, Anabaena sp.
atagacaaggcaatcctgagccaagccgaagtagtaattagtaagttaacaatagatgacttacaactaatcggaaggtgcagagactcgacgggagctaccctaacgtcaagacgagggtaaagagagagtccaattctcaaagccaataggcagtagcgaaagctgcaagagaatgaaaatccgt

SEQ ID NO: 80 - DNA, 186 bp, Anabaena sp.
tagacaaggcaatcctgagccaagccgaagtagtaattagtaagttaacaatagatgacttacaactaatcggaaggtgcagagactcgacgggagctaccctaacgtcaagacgagggtaaagagagagtccaattctcaaagccaataggcagtagcgaaagctgcaagagaatgaaaatccgt

SEQ ID NO: 81 - DNA, 139 bp, Anabaena sp.
acaatagatgacttacaactaatcggaaggtgcagagactcgacgggagctaccctaacgtcaagacgagggtaaagagagagtccaattctcaaagccaataggcagtagcgaaagctgcaagagaatgaaaatccgt

SEQ ID NO: 82 - DNA, 138 bp, Anabaena sp.
caatagatgacttacaactaatcggaaggtgcagagactcgacgggagctaccctaacgtcaagacgagggtaaagagagagtccaattctcaaagccaataggcagtagcgaaagctgcaagagaatgaaaatccgt

SEQ ID NO: 83 - DNA, 137 bp, Anabaena sp.
aatagatgacttacaactaatcggaaggtgcagagactcgacgggagctaccctaacgtcaagacgagggtaaagagagagtccaattctcaaagccaataggcagtagcgaaagctgcaagagaatgaaaatccgt

SEQ ID NO: 84 - DNA, 136 bp, Anabaena sp.
atagatgacttacaactaatcggaaggtgcagagactcgacgggagctaccctaacgtcaagacgagggtaaagagagagtccaattctcaaagccaataggcagtagcgaaagctgcaagagaatgaaaatccgt

SEQ ID NO: 85 - DNA, 135 bp, Anabaena sp.
tagatgacttacaactaatcggaaggtgcagagactcgacgggagctaccctaacgtcaagacgagggtaaagagagagtccaattctcaaagccaataggcagtagcgaaagctgcaagagaatgaaaatccgt

SEQ ID NO: 86 - DNA, 134 bp, Anabaena sp.
agatgacttacaactaatcggaaggtgcagagactcgacgggagctaccctaacgtcaagacgagggtaaagagagagtccaattctcaaagccaataggcagtagcgaaagctgcaagagaatgaaaatccgt

SEQ ID NO: 87 - DNA, 133 bp, Anabaena sp.
gatgacttacaactaatcggaaggtgcagagactcgacgggagctaccctaacgtcaagacgagggtaaagagagagtccaattctcaaagccaataggcagtagcgaaagctgcaagagaatgaaaatccgt

SEQ ID NO: 88 - DNA, 132 bp, Anabaena sp.
atgacttacaactaatcggaaggtgcagagactcgacgggagctaccctaacgtcaagacgagggtaaagagagagtccaattctcaaagccaataggcagtagcgaaagctgcaagagaatgaaaatccgt

SEQ ID NO: 89 - DNA, 131 bp, Anabaena sp.
tgacttacaactaatcggaaggtgcagagactcgacgggagctaccctaacgtcaagacgagggtaaagagagagtccaattctcaaagccaataggcagtagcgaaagctgcaagagaatgaaaatccgt

SEQ ID NO: 90 - DNA, 78 bp, Anabaena sp.
caagacgagggtaaagagagagtccaattctcaaagccaataggcagtagcgaaagctgcaagagaatgaaaatccgt

SEQ ID NO: 91 - DNA, 77 bp, Anabaena sp.
aagacgagggtaaagagagagtccaattctcaaagccaataggcagtagcgaaagctgcaagagaatgaaaatccgt

SEQ ID NO: 92 - DNA, 76 bp, Anabaena sp.
agacgagggtaaagagagagtccaattctcaaagccaataggcagtagcgaaagctgcaagagaatgaaaatccgt

SEQ ID NO: 93 - DNA, 75 bp, Anabaena sp.
gacgagggtaaagagagagtccaattctcaaagccaataggcagtagcgaaagctgcaagagaatgaaaatccgt

SEQ ID NO: 94 - DNA, 74 bp, Anabaena sp.
acgagggtaaagagagagtccaattctcaaagccaataggcagtagcgaaagctgcaagagaatgaaaatccgt

SEQ ID NO: 95 - DNA, 40 bp, Anabaena sp.
aataggcagtagcgaaagctgcaagagaatgaaaatccgt

SEQ ID NO: 96 - DNA, 39 bp, Anabaena sp.
ataggcagtagcgaaagctgcaagagaatgaaaatccgt

SEQ ID NO: 97 - DNA, 38 bp, Anabaena sp.
taggcagtagcgaaagctgcaagagaatgaaaatccgt

SEQ ID NO: 98 - DNA, 37 bp, Anabaena sp.
aggcagtagcgaaagctgcaagagaatgaaaatccgt

SEQ ID NO: 99 - DNA, 36 bp, Anabaena sp.
ggcagtagcgaaagctgcaagagaatgaaaatccgt

SEQ ID NO: 100 - DNA, 27 bp, Anabaena sp.
gaaagctgcaagagaatgaaaatccgt

SEQ ID NO: 101 - DNA, 26 bp, Anabaena sp.
aaagctgcaagagaatgaaaatccgt

SEQ ID NO: 102 - DNA, 25 bp, Anabaena sp.
aagctgcaagagaatgaaaatccgt

SEQ ID NO: 103 - DNA, 24 bp, Anabaena sp.
agctgcaagagaatgaaaatccgt

SEQ ID NO: 104 - DNA, 23 bp, Anabaena sp.
gctgcaagagaatgaaaatccgt

SEQ ID NO: 105 - DNA, 22 bp, Anabaena sp.
ctgcaagagaatgaaaatccgt

SEQ ID NO: 106 - DNA, 18 bp, Anabaena sp.
aagagaatgaaaatccgt

SEQ ID NO: 107 - DNA, 17 bp, Anabaena sp.
agagaatgaaaatccgt

SEQ ID NO: 108 - DNA, 16 bp, Anabaena sp.
gagaatgaaaatccgt

SEQ ID NO: 109 - DNA, 35 bp, Anabaena sp.
gcagtagcgaaagctgcaagagaatgaaaatccgt

SEQ ID NO: 110 - DNA, 33 bp, Anabaena sp.
agtagcgaaagctgcaagagaatgaaaatccgt

SEQ ID NO: 111 - DNA, 32 bp, Anabaena sp.
gtagcgaaagctgcaagagaatgaaaatccgt

SEQ ID NO: 112 - DNA, 26 bp, Anabaena sp.
acggacttaaataattgagccttaaa

SEQ ID NO: 113 - DNA, 27 bp, Anabaena sp.
acggacttaaataattgagccttaaag

SEQ ID NO: 114 - DNA, 28 bp, Anabaena sp.
acggacttaaataattgagccttaaaga

SEQ ID NO: 115 - DNA, 76 bp, Anabaena sp.
acggacttaaataattgagccttaaagaagaaattctttaagtggatgctctcaaactcagggaaacctaaatcta

SEQ ID NO: 116 - DNA, 77 bp, Anabaena sp.
acggacttaaataattgagccttaaagaagaaattctttaagtggatgctctcaaactcagggaaacctaaatctag

SEQ ID NO: 117 - DNA, 78 bp, Anabaena sp.
acggacttaaataattgagccttaaagaagaaattctttaagtggatgctctcaaactcagggaaacctaaatctagt

SEQ ID NO: 118 - DNA, 79 bp, Anabaena sp.
acggacttaaataattgagccttaaagaagaaattctttaagtggatgctctcaaactcagggaaacctaaatctagtt

SEQ ID NO: 119 - DNA, 80 bp, Anabaena sp.
acggacttaaataattgagccttaaagaagaaattctttaagtggatgctctcaaactcagggaaacctaaatctagtta

SEQ ID NO: 120 - DNA, 127 bp, Anabaena sp.
acggacttaaataattgagccttaaagaagaaattctttaagtggatgctctcaaactcagggaaacctaaatctagttatagacaaggcaatcctgagccaagccgaagtagtaattagtaagtta

SEQ ID NO: 121 - DNA, 128 bp, Anabaena sp.
acggacttaaataattgagccttaaagaagaaattctttaagtggatgctctcaaactcagggaaacctaaatctagttatagacaaggcaatcctgagccaagccgaagtagtaattagtaagttaa

SEQ ID NO: 122 - DNA, 129 bp, Anabaena sp.
acggacttaaataattgagccttaaagaagaaattctttaagtggatgctctcaaactcagggaaacctaaatctagttatagacaaggcaatcctgagccaagccgaagtagtaattagtaagttaac

SEQ ID NO: 123 - DNA, 130 bp, Anabaena sp.
acggacttaaataattgagccttaaagaagaaattctttaagtggatgctctcaaactcagggaaacctaaatctagttatagacaaggcaatcctgagccaagccgaagtagtaattagtaagttaaca

SEQ ID NO: 124 - DNA, 131 bp, Anabaena sp.
acggacttaaataattgagccttaaagaagaaattctttaagtggatgctctcaaactcagggaaacctaaatctagttatagacaaggcaatcctgagccaagccgaagtagtaattagtaagttaacaa

SEQ ID NO: 125 - DNA, 132 bp, Anabaena sp.
acggacttaaataattgagccttaaagaagaaattctttaagtggatgctctcaaactcagggaaacctaaatctagttatagacaaggcaatcctgagccaagccgaagtagtaattagtaagttaacaat

SEQ ID NO: 126 - DNA, 133 bp, Anabaena sp.
acggacttaaataattgagccttaaagaagaaattctttaagtggatgctctcaaactcagggaaacctaaatctagttatagacaaggcaatcctgagccaagccgaagtagtaattagtaagttaacaata

SEQ ID NO: 127 - DNA, 134 bp, Anabaena sp.
acggacttaaataattgagccttaaagaagaaattctttaagtggatgctctcaaactcagggaaacctaaatctagttatagacaaggcaatcctgagccaagccgaagtagtaattagtaagttaacaatag

SEQ ID NO: 128 - DNA, 135 bp, Anabaena sp.
acggacttaaataattgagccttaaagaagaaattctttaagtggatgctctcaaactcagggaaacctaaatctagttatagacaaggcaatcctgagccaagccgaagtagtaattagtaagttaacaataga

SEQ ID NO: 129 - DNA, 188 bp, Anabaena sp.
acggacttaaataattgagccttaaagaagaaattctttaagtggatgctctcaaactcagggaaacctaaatctagttatagacaaggcaatcctgagccaagccgaagtagtaattagtaagttaacaatagatgacttacaactaatcggaaggtgcagagactcgacgggagctaccctaacgt

SEQ ID NO: 130 - DNA, 189 bp, Anabaena sp.
acggacttaaataattgagccttaaagaagaaattctttaagtggatgctctcaaactcagggaaacctaaatctagttatagacaaggcaatcctgagccaagccgaagtagtaattagtaagttaacaatagatgacttacaactaatcggaaggtgcagagactcgacgggagctaccctaacgtc

SEQ ID NO: 131 - DNA, 190 bp, Anabaena sp.
acggacttaaataattgagccttaaagaagaaattctttaagtggatgctctcaaactcagggaaacctaaatctagttatagacaaggcaatcctgagccaagccgaagtagtaattagtaagttaacaatagatgacttacaactaatcggaaggtgcagagactcgacgggagctaccctaacgtca

SEQ ID NO: 132 - DNA, 191 bp, Anabaena sp.
acggacttaaataattgagccttaaagaagaaattctttaagtggatgctctcaaactcagggaaacctaaatctagttatagacaaggcaatcctgagccaagccgaagtagtaattagtaagttaacaatagatgacttacaactaatcggaaggtgcagagactcgacgggagctaccctaacgtcaa

SEQ ID NO: 133 - DNA, 192 bp, Anabaena sp.
acggacttaaataattgagccttaaagaagaaattctttaagtggatgctctcaaactcagggaaacctaaatctagttatagacaaggcaatcctgagccaagccgaagtagtaattagtaagttaacaatagatgacttacaactaatcggaaggtgcagagactcgacgggagctaccctaacgtcaag

SEQ ID NO: 134 - DNA, 226 bp, Anabaena sp.
acggacttaaataattgagccttaaagaagaaattctttaagtggatgctctcaaactcagggaaacctaaatctagttatagacaaggcaatcctgagccaagccgaagtagtaattagtaagttaacaatagatgacttacaactaatcggaaggtgcagagactcgacgggagctaccctaacgtcaagacgagggtaaagagagagtccaattctcaaagcc

SEQ ID NO: 135 - DNA, 227 bp, Anabaena sp.
acggacttaaataattgagccttaaagaagaaattctttaagtggatgctctcaaactcagggaaacctaaatctagttatagacaaggcaatcctgagccaagccgaagtagtaattagtaagttaacaatagatgacttacaactaatcggaaggtgcagagactcgacgggagctaccctaacgtcaagacgagggtaaagagagagtccaattctcaaagcca

SEQ ID NO: 136 - DNA, 228 bp, Anabaena sp.
acggacttaaataattgagccttaaagaagaaattctttaagtggatgctctcaaactcagggaaacctaaatctagttatagacaaggcaatcctgagccaagccgaagtagtaattagtaagttaacaatagatgacttacaactaatcggaaggtgcagagactcgacgggagctaccctaacgtcaagacgagggtaaagagagagtccaattctcaaagccaa

SEQ ID NO: 137 - DNA, 229 bp, Anabaena sp.
acggacttaaataattgagccttaaagaagaaattctttaagtggatgctctcaaactcagggaaacctaaatctagttatagacaaggcaatcctgagccaagccgaagtagtaattagtaagttaacaatagatgacttacaactaatcggaaggtgcagagactcgacgggagctaccctaacgtcaagacgagggtaaagagagagtccaattctcaaagccaat

SEQ ID NO: 138 - DNA, 230 bp, Anabaena sp.
acggacttaaataattgagccttaaagaagaaattctttaagtggatgctctcaaactcagggaaacctaaatctagttatagacaaggcaatcctgagccaagccgaagtagtaattagtaagttaacaatagatgacttacaactaatcggaaggtgcagagactcgacgggagctaccctaacgtcaagacgagggtaaagagagagtccaattctcaaagccaata

SEQ ID NO: 139 - DNA, 239 bp, Anabaena sp.
acggacttaaataattgagccttaaagaagaaattctttaagtggatgctctcaaactcagggaaacctaaatctagttatagacaaggcaatcctgagccaagccgaagtagtaattagtaagttaacaatagatgacttacaactaatcggaaggtgcagagactcgacgggagctaccctaacgtcaagacgagggtaaagagagagtccaattctcaaagccaataggcagtagc

SEQ ID NO: 140 - DNA, 240 bp, Anabaena sp.
acggacttaaataattgagccttaaagaagaaattctttaagtggatgctctcaaactcagggaaacctaaatctagttatagacaaggcaatcctgagccaagccgaagtagtaattagtaagttaacaatagatgacttacaactaatcggaaggtgcagagactcgacgggagctaccctaacgtcaagacgagggtaaagagagagtccaattctcaaagccaataggcagtagcg

SEQ ID NO: 141 - DNA, 241 bp, Anabaena sp.
acggacttaaataattgagccttaaagaagaaattctttaagtggatgctctcaaactcagggaaacctaaatctagttatagacaaggcaatcctgagccaagccgaagtagtaattagtaagttaacaatagatgacttacaactaatcggaaggtgcagagactcgacgggagctaccctaacgtcaagacgagggtaaagagagagtccaattctcaaagccaataggcagtagcga

SEQ ID NO: 142 - DNA, 242 bp, Anabaena sp.
acggacttaaataattgagccttaaagaagaaattctttaagtggatgctctcaaactcagggaaacctaaatctagttatagacaaggcaatcctgagccaagccgaagtagtaattagtaagttaacaatagatgacttacaactaatcggaaggtgcagagactcgacgggagctaccctaacgtcaagacgagggtaaagagagagtccaattctcaaagccaataggcagtagcgaa

SEQ ID NO: 143 - DNA, 243 bp, Anabaena sp.
acggacttaaataattgagccttaaagaagaaattctttaagtggatgctctcaaactcagggaaacctaaatctagttatagacaaggcaatcctgagccaagccgaagtagtaattagtaagttaacaatagatgacttacaactaatcggaaggtgcagagactcgacgggagctaccctaacgtcaagacgagggtaaagagagagtccaattctcaaagccaataggcagtagcgaaa

SEQ ID NO: 144 - DNA, 244 bp, Anabaena sp.
acggacttaaataattgagccttaaagaagaaattctttaagtggatgctctcaaactcagggaaacctaaatctagttatagacaaggcaatcctgagccaagccgaagtagtaattagtaagttaacaatagatgacttacaactaatcggaaggtgcagagactcgacgggagctaccctaacgtcaagacgagggtaaagagagagtccaattctcaaagccaataggcagtagcgaaag

SEQ ID NO: 145 - DNA, 248 bp, Anabaena sp.
acggacttaaataattgagccttaaagaagaaattctttaagtggatgctctcaaactcagggaaacctaaatctagttatagacaaggcaatcctgagccaagccgaagtagtaattagtaagttaacaatagatgacttacaactaatcggaaggtgcagagactcgacgggagctaccctaacgtcaagacgagggtaaagagagagtccaattctcaaagccaataggcagtagcgaaagctgc

SEQ ID NO: 146 - DNA, 249 bp, Anabaena sp.
acggacttaaataattgagccttaaagaagaaattctttaagtggatgctctcaaactcagggaaacctaaatctagttatagacaaggcaatcctgagccaagccgaagtagtaattagtaagttaacaatagatgacttacaactaatcggaaggtgcagagactcgacgggagctaccctaacgtcaagacgagggtaaagagagagtccaattctcaaagccaataggcagtagcgaaagctgca

SEQ ID NO: 147 - DNA, 250 bp, Anabaena sp.
acggacttaaataattgagccttaaagaagaaattctttaagtggatgctctcaaactcagggaaacctaaatctagttatagacaaggcaatcctgagccaagccgaagtagtaattagtaagttaacaatagatgacttacaactaatcggaaggtgcagagactcgacgggagctaccctaacgtcaagacgagggtaaagagagagtccaattctcaaagccaataggcagtagcgaaagctgcaa

SEQ ID NO: 148 - DNA, 231 bp, Anabaena sp.
acggacttaaataattgagccttaaagaagaaattctttaagtggatgctctcaaactcagggaaacctaaatctagttatagacaaggcaatcctgagccaagccgaagtagtaattagtaagttaacaatagatgacttacaactaatcggaaggtgcagagactcgacgggagctaccctaacgtcaagacgagggtaaagagagagtccaattctcaaagccaatag

SEQ ID NO: 149 - DNA, 233 bp, Anabaena sp.
acggacttaaataattgagccttaaagaagaaattctttaagtggatgctctcaaactcagggaaacctaaatctagttatagacaaggcaatcctgagccaagccgaagtagtaattagtaagttaacaatagatgacttacaactaatcggaaggtgcagagactcgacgggagctaccctaacgtcaagacgagggtaaagagagagtccaattctcaaagccaataggc

SEQ ID NO: 150 - DNA, 234 bp, Anabaena sp.
acggacttaaataattgagccttaaagaagaaattctttaagtggatgctctcaaactcagggaaacctaaatctagttatagacaaggcaatcctgagccaagccgaagtagtaattagtaagttaacaatagatgacttacaactaatcggaaggtgcagagactcgacgggagctaccctaacgtcaagacgagggtaaagagagagtccaattctcaaagccaataggca

SEQ ID NO: 151 - DNA, 104 bp, Azoarcus sp.
tgcgccgatgaaggtgtagagactagacggcacccacctaaggcaaacgctatggtgaaggcatagtccagggagtggcgaaagtcacacaaaccggaatccgt

SEQ ID NO: 152 - DNA, 141 bp, Azoarcus sp.
ccgggcgtatggcaacgccgagccaagcttcggcgcctgcgccgatgaaggtgtagagactagacggcacccacctaaggcaaacgctatggtgaaggcatagtccagggagtggcgaaagtcacacaaaccggaatccgt

SEQ ID NO: 153 - DNA, 78 bp, Azoarcus sp.
acggcacccacctaaggcaaacgctatggtgaaggcatagtccagggagtggcgaaagtcacacaaaccggaatccgt

SEQ ID NO: 154 - DNA, 58 bp, Azoarcus sp.
acgctatggtgaaggcatagtccagggagtggcgaaagtcacacaaaccggaatccgt

SEQ ID NO: 155 - DNA, 75 bp, Thiomargarita sp.
attaaagttatagaattatcagagaatgatatagtccaagccttatggtaacatgagggcacttgaccctggtag

SEQ ID NO: 156 - DNA, 195 bp, Staphylococcus virus Twort
aagatgtaggcaatcctgagctaagctcttagtaataagagaaagtgcaacgactattccgataggaagtagggtcaagtgactcgaaatggggattacccttctagggtagtgatatagtctgaacatatatggaaacatatagaaggataggagtaacgaacctattcgtaacataattgaacttttagttat

SEQ ID NO: 157 - DNA, 163 bp, Staphylococcus virus Twort
taataagagaaagtgcaacgactattccgataggaagtagggtcaagtgactcgaaatggggattacccttctagggtagtgatatagtctgaacatatatggaaacatatagaaggataggagtaacgaacctattcgtaacataattgaacttttagttat

SEQ ID NO: 158 - DNA, 133 bp, Staphylococcus virus Twort
taggaagtagggtcaagtgactcgaaatggggattacccttctagggtagtgatatagtctgaacatatatggaaacatatagaaggataggagtaacgaacctattcgtaacataattgaacttttagttat

SEQ ID NO: 159 - DNA, 92 bp, Staphylococcus virus Twort
ctagggtagtgatatagtctgaacatatatggaaacatatagaaggataggagtaacgaacctattcgtaacataattgaacttttagttat

SEQ ID NO: 160 - DNA, 92 bp, Unknown
  Description of Unknown: LSUp1 sequence
agttaataaagatgatgaaatagtctgaaccattttgagaaaagtggaaataaaagaaaatcttttatgataacataaattgaacaggctaa

SEQ ID NO: 161 - DNA, 62 bp, Unknown
  Description of Unknown: Bacteriophage Phi I sequence
caaagactgatgatatagtccgacactcctagtaataggagaatacagaaaggatgaaatcc

SEQ ID NO: 162 - DNA, 76 bp, Nostoc sp.
agtcgagggtaaagggagagtccaattctcaaagcctattggcagtagcgaaagctgcgggagaatgaaaatccgt

SEQ ID NO: 163 - DNA, 76 bp, Nostoc sp.
agccgagggtaaagggagagtccaattctcaaagccaataggcagtagcgaaagctgcgggagaatgaaaatccgt

SEQ ID NO: 164 - DNA, 89 bp, Nodularia sp.
agccgagggtaaagggagagtccaattctcaaagccgaaggttattaaaacctggcagcagtgaaagctgcgggagaatgaaaatccgt

SEQ ID NO: 165 - DNA, 79 bp, Pleurocapsa sp.
agctgagggtaaagagagagtccaattctcaaagccagcagatggcagtagcgaaagctgcgggagaatgaaaatccgt

SEQ ID NO: 166 - DNA, 76 bp, Planktothrix sp.
agccgagggtaaagagagagtccaattctcaaagccaattggtagtagcgaaagctacgggagaatgaaaatccgt

SEQ ID NO: 167 - DNA, 118 bp, Azoarcus sp.
gcggactcatatttcgatgtgccttgcgccgggaaaccacgcaagggatggtgtcaaattcggcgaaacctaagcgcccgcccgggcgtatggcaacgccgagccaagcttcggcgcc

SEQ ID NO: 168 - DNA, 81 bp, Azoarcus sp.
gcggactcatatttcgatgtgccttgcgccgggaaaccacgcaagggatggtgtcaaattcggcgaaacctaagcgcccgc

SEQ ID NO: 169 - DNA, 144 bp, Azoarcus sp.
gcggactcatatttcgatgtgccttgcgccgggaaaccacgcaagggatggtgtcaaattcggcgaaacctaagcgcccgcccgggcgtatggcaacgccgagccaagcttcggcgcctgcgccgatgaaggtgtagagactag

SEQ ID NO: 170 - DNA, 164 bp, Azoarcus sp.
gcggactcatatttcgatgtgccttgcgccgggaaaccacgcaagggatggtgtcaaattcggcgaaacctaagcgcccgcccgggcgtatggcaacgccgagccaagcttcggcgcctgcgccgatgaaggtgtagagactagacggcacccacctaaggcaa

SEQ ID NO: 171 - DNA, 179 bp, Thiomargarita sp.
aggattagatactacactaagtgtcccccagactggtgacagtctggtgtgcatccagctatatcggtgaaaccccattggggtaataccgagggaagctatattatatatatattaataaatagccccgtagagactatgtaggtaaggagatagaagatgataaaatcaaaatcatc

SEQ ID NO: 172 - DNA, 84 bp, Staphylococcus virus Twort
actactgaaagcataaataattgtgcctttatacagtaatgtatatcgaaaaatcctctaattcagggaacacctaaacaaact

SEQ ID NO: 173 - DNA, 116 bp, Staphylococcus virus Twort
actactgaaagcataaataattgtgcctttatacagtaatgtatatcgaaaaatcctctaattcagggaacacctaaacaaactaagatgtaggcaatcctgagctaagctcttag

SEQ ID NO: 174 - DNA, 146 bp, Staphylococcus virus Twort
actactgaaagcataaataattgtgcctttatacagtaatgtatatcgaaaaatcctctaattcagggaacacctaaacaaactaagatgtaggcaatcctgagctaagctcttagtaataagagaaagtgcaacgactattccga

SEQ ID NO: 175 - DNA, 187 bp, Staphylococcus virus Twort
actactgaaagcataaataattgtgcctttatacagtaatgtatatcgaaaaatcctctaattcagggaacacctaaacaaactaagatgtaggcaatcctgagctaagctcttagtaataagagaaagtgcaacgactattccgataggaagtagggtcaagtgactcgaaatggggattaccctt

SEQ ID NO: 176 - DNA, 216 bp, Unknown
  Description of Unknown: LSUp1 sequence
cgctagggatttataactgtgagtcctccaatattataaaatgttggtaatatattgggtaaatttcaaagacaacttttctccacgtcaggatatagtgtatttgaagcgaaacttattttagcagtgaaaaagcaaataaggacgttcaacgactaaaaggtgagtattgctaacaataatccttttttttaatgcccaacatctttattaact

SEQ ID NO: 177 - DNA, 559 bp, Unknown
  Description of Unknown: Bacteriophage Phi I sequence
gtgggtgcataaactatttcattgtgcacattaaatctggtgaactcggtgaaaccctaatggggcaataccgagccaagccatagggaggatatatgagaggcaagaagttaattcttgaggccactgagactggctgtatcatccctacgtcacacaaacttaatgccgatggttatttcagaaagaaaaccaatggcgtcttagagatgtatcacagaacggtgtggaaggagcataacggagacatacctgatggcttcgagatagaccataagtgtcgcaatagggcttgctgtaatatagagcatttacagatgcttgagggtacagcccacactgttaagaccaatcgtgaacgctacgcagacagaaaggaaacagctagggaatactggctggagactggatgtaccggcctagcactcggtgagaagtttggtgtgtcgttctcttctgcttgtaagtggattagagaatggaaggcgtagagactatccgaaaggagtagggccgagggtgagactccctcgtaacccgaagcgccagacagtcaact

SEQ ID NO: 178 - DNA, 218 bp, Nostoc sp.
acggacttaagtaattgagccttaaagaagaaattctttaagtggcagctctcaaactcagggaaacctaaatctgttcacagacaaggcaatcctgagccaagccgaaagagtcatgagtgctgagtagtgagtaaaataaaagctcacaactcagaggttgtaactctaagctagtcggaaggtgcagagactcgacgggagctaccctaacgtaa

SEQ ID NO: 179 - DNA, 165 bp, Nostoc sp.
acggacttaaactgaattgagccttagagaagaaattctttaagtgtcagctctcaaactcagggaaacctaaatctgttgacagacaaggcaatcctgagccaagccgagaactctaagttattcggaaggtgcagagactcgacgggagctaccctaacgtca

SEQ ID NO: 180 - DNA, 181 bp, Nodularia sp.
acggacttagaaaactgagccttgatcgagaaatctttcaagtggaagctctcaaattcagggaaacctaaatctgtttacagatatggcaatcctgagccaagccgaaacaagtcctgagtgttaaagctcataactcatcggaaggtgcagagactcgacgggagctaccctaacgtta

SEQ ID NO: 181 - DNA, 188 bp, Pleurocapsa sp.
acggacttaaaaaaattgagccttggcagagaaatctgtcatgcgaacgctctcaaattcagggaaacctaagtctggcaacagatatggcaatcctgagccaagccttaatcaaggaaaaaaacatttttaccttttaccttgaaaggaaggtgcagagactcaacgggagctaccctaacaggtca

SEQ ID NO: 182 - DNA, 200 bp, Planktothrix sp.
acggacttaaagataaattgagccttgaggcgagaaatctctcaagtgtaagctgtcaaattcagggaaacctaaatctgtaaattcagacaaggcaatcctgagccaagcctaggggtattagaaatgagggagtttccccaatctaagatcaatacctaggaaggtgcagagactcgacgggagctaccctaacgtta

SEQ ID NO: 183 - DNA, 166 bp, Artificial Sequence
  Description of Artificial Sequence: Synthetic polynucleotide
agtatataagaaacaaaccactagatgacttacaactaatcggaaggtgcagagactcgacgggagctaccctaacgtcaagacgagggtaaagagagagtccaattctcaaagccaataggcagtagcgaaagctgcaagagaatgaaaatccgtggctcgcagc

SEQ ID NO: 184 - DNA, 176 bp, Artificial Sequence
  Description of Artificial Sequence: Synthetic polynucleotide
ctgaaattatacttatactcaaacaaaccactagatgacttacaactaatcggaaggtgcagagactcgacgggagctaccctaacgtcaagacgagggtaaagagagagtccaattctcaaagccaataggcagtagcgaaagctgcaagagaatgaaaatccgtggctcgcagc

SEQ ID NO: 185 - DNA, 186 bp, Artificial Sequence
  Description of Artificial Sequence: Synthetic polynucleotide
ctgaaattatacttatactcagtatatgacaaacaaaccactagatgacttacaactaatcggaaggtgcagagactcgacgggagctaccctaacgtcaagacgagggtaaagagagagtccaattctcaaagccaataggcagtagcgaaagctgcaagagaatgaaaatccgtggctcgcagc

SEQ ID NO: 186 - DNA, 196 bp, Artificial Sequence
  Description of Artificial Sequence: Synthetic polynucleotide
catcaacaatatgaaattatacttatactcagtatatgacaaacaaaccactagatgacttacaactaatcggaaggtgcagagactcgacgggagctaccctaacgtcaagacgagggtaaagagagagtccaattctcaaagccaataggcagtagcgaaagctgcaagagaatgaaaatccgtggctcgcagc

SEQ ID NO: 187 - DNA, 206 bp, Artificial Sequence
  Description of Artificial Sequence: Synthetic polynucleotide
catcaacaatatgaaactatacttatactcagtatatgaagcattatcgcaaacaaaccactagatgacttacaactaatcggaaggtgcagagactcgacgggagctaccctaacgtcaagacgagggtaaagagagagtccaattctcaaagccaataggcagtagcgaaagctgcaagagaatgaaaatccgtggctcgcagc

SEQ ID NO: 188 - DNA, 166 bp, Artificial Sequence
  Description of Artificial Sequence: Synthetic polynucleotide
tagcgtcagcaaacaaacaaatagatgacttacaactaatcggaaggtgcagagactcgacgggagctaccctaacgtcaagacgagggtaaagagagagtccaattctcaaagccaataggcagtagcgaaagctgcaagagaatgaaaatccgtggctcgcagc

SEQ ID NO: 189 - DNA, 176 bp, Artificial Sequence
  Description of Artificial Sequence: Synthetic polynucleotide
atactcatactagcgtcagcaaacaaacaaatagatgacttacaactaatcggaaggtgcagagactcgacgggagctaccctaacgtcaagacgagggtaaagagagagtccaattctcaaagccaataggcagtagcgaaagctgcaagagaatgaaaatccgtggctcgcagc

SEQ ID NO: 190 - DNA, 186 bp, Artificial Sequence
  Description of Artificial Sequence: Synthetic polynucleotide
gtgtgaagctatactcatactagcgtcagcaaacaaacaaatagatgacttacaactaatcggaaggtgcagagactcgacgggagctaccctaacgtcaagacgagggtaaagagagagtccaattctcaaagccaataggcagtagcgaaagctgcaagagaatgaaaatccgtggctcgcagc

SEQ ID NO: 191 - DNA, 196 bp, Artificial Sequence
  Description of Artificial Sequence: Synthetic polynucleotide
cctcacctgagtgtgaagctatactcatactagcgtcagcaaacaaacaaatagatgacttacaactaatcggaaggtgcagagactcgacgggagctaccctaacgtcaagacgagggtaaagagagagtccaattctcaaagccaataggcagtagcgaaagctgcaagagaatgaaaatccgtggctcgcagc

SEQ ID NO: 192 - DNA, 206 bp, Artificial Sequence
  Description of Artificial Sequence: Synthetic polynucleotide
ccgaatgatgcctcacctgagtgtgaagctatactcatactagcgtcagcaaacaaacaaatagatgacttacaactaatcggaaggtgcagagactcgacgggagctaccctaacgtcaagacgagggtaaagagagagtccaattctcaaagccaataggcagtagcgaaagctgcaagagaatgaaaatccgtggctcgcagc

SEQ ID NO: 193 - DNA, 166 bp, Artificial Sequence
  Description of Artificial Sequence: Synthetic polynucleotide
cggtgcgagcaaacaaacaaatagatgacttacaactaatcggaaggtgcagagactcgacgggagctaccctaacgtcaagacgagggtaaagagagagtccaattctcaaagccaataggcagtagcgaaagctgcaagagaatgaaaatccgtggctcgcagc

SEQ ID NO: 194 - DNA, 176 bp, Artificial Sequence
  Description of Artificial Sequence: Synthetic polynucleotide
cgctccgacccagtgcgagcaaacaaacaaatagatgacttacaactaatcggaaggtgcagagactcgacgggagctaccctaacgtcaagacgagggtaaagagagagtccaattctcaaagccaataggcagtagcgaaagctgcaagagaatgaaaatccgtggctcgcagc

SEQ ID NO: 195 - DNA, 186 bp, Artificial Sequence
  Description of Artificial Sequence: Synthetic polynucleotide
ctgaaattatactaatactcagtatatgacaaacaaaccactagatgacttacaactaatcggaaggtgcagagactcgacgggagctaccctaacgtcaagacgagggtaaagagagagtccaattctcaaagccaataggcagtagcgaaagctgcaagagaatgaaaatccgtggctcgcagc

SEQ ID NO: 196 - DNA, 186 bp, Artificial Sequence
  Description of Artificial Sequence: Synthetic polynucleotide
ctgaaaatatactaatactcactatatgacaaacaaaccactagatgacttacaactaatcggaaggtgcagagactcgacgggagctaccctaacgtcaagacgagggtaaagagagagtccaattctcaaagccaataggcagtagcgaaagctgcaagagaatgaaaatccgtggctcgcagc

SEQ ID NO: 197 - DNA, 186 bp, Artificial Sequence
  Description of Artificial Sequence: Synthetic polynucleotide
ctgataatatagtaatactcactatatgacaaacaaaccactagatgacttacaactaatcggaaggtgcagagactcgacgggagctaccctaacgtcaagacgagggtaaagagagagtccaattctcaaagccaataggcagtagcgaaagctgcaagagaatgaaaatccgtggctcgcagc

SEQ ID NO: 198 - DNA, 186 bp, Artificial Sequence
  Description of Artificial Sequence: Synthetic polynucleotide
ctgataataaagtaatacacactataagacaaacaaaccactagatgacttacaactaatcggaaggtgcagagactcgacgggagctaccctaacgtcaagacgagggtaaagagagagtccaattctcaaagccaataggcagtagcgaaagctgcaagagaatgaaaatccgtggctcgcagc

SEQ ID NO: 199 - DNA, 186 bp, Artificial Sequence
  Description of Artificial Sequence: Synthetic polynucleotide
ctgaaattatacttatactctctaagttacaaacaaaccactagatgacttacaactaatcggaaggtgcagagactcgacgggagctaccctaacgtcaagacgagggtaaagagagagtccaattctcaaagccaataggcagtagcgaaagctgcaagagaatgaaaatccgtggctcgcagc

SEQ ID NO: 200 - DNA, 186 bp, Artificial Sequence
  Description of Artificial Sequence: Synthetic polynucleotide
ctgaaattatgtgtgttacatctaagttacaaacaaaccactagatgacttacaactaatcggaaggtgcagagactcgacgggagctaccctaacgtcaagacgagggtaaagagagagtccaattctcaaagccaataggcagtagcgaaagctgcaagagaatgaaaatccgtggctcgcagc

SEQ ID NO: 201 - DNA, 186 bp, Artificial Sequence
  Description of Artificial Sequence: Synthetic polynucleotide
gttgatcggtgtgtgttacatctaagttacaaacaaaccactagatgacttacaactaatcggaaggtgcagagactcgacgggagctaccctaacgtcaagacgagggtaaagagagagtccaattctcaaagccaataggcagtagcgaaagctgcaagagaatgaaaatccgtggctcgcagc

SEQ ID NO: 202 - DNA, 186 bp, Artificial Sequence
  Description of Artificial Sequence: Synthetic polynucleotide
ctgaaattatacttatactcagtatatgacaaacaaaccactagatgacttacaactaatcggaaggtgcagagactcgacgggagctaccctaacgtcaagacgagggtaaagagagagtccaattctcaaagccaataggcagtagcgaaagctgcaagagaatgaaaatccgtgattaaacag

SEQ ID NO: 203 - DNA, 196 bp, Artificial Sequence
  Description of Artificial Sequence: Synthetic polynucleotide
ctgaaattatacttatactcagtatatgacaaacaaaccactagatgacttacaactaatcggaaggtgcagagactcgacgggagctaccctaacgtcaagacgagggtaaagagagagtccaattctcaaagccaataggcagtagcgaaagctgcaagagaatgaaaatccgtgattcacaatataaattacg

SEQ ID NO: 204 - DNA, 186 bp, Artificial Sequence
  Description of Artificial Sequence: Synthetic polynucleotide
ctgaaattatacttatactcagtatatgacaaacaaaccactagatgacttacaactaatcggaaggtgcagagactcgacgggagctaccctaacgtcaagacgagggtaaagagagagtccaattctcaaagccaataggcagtagcgaaagctgcaagagaatgaaaatccgtggatcatagc

SEQ ID NO: 205 - DNA, 196 bp, Artificial Sequence
  Description of Artificial Sequence: Synthetic polynucleotide
ctgaaattatacttatactcagtatatgacaaacaaaccactagatgacttacaactaatcggaaggtgcagagactcgacgggagctaccctaacgtcaagacgagggtaaagagagagtccaattctcaaagccaataggcagtagcgaaagctgcaagagaatgaaaatccgtggatcgcagcataatatccg

SEQ ID NO: 206 - DNA, 196 bp, Artificial Sequence
  Description of Artificial Sequence: Synthetic polynucleotide
ctgaaattatacttatactcagtatatgacaaacaaaccactagatgacttacaactaatcggaaggtgcagagactcgacgggagctaccctaacgtcaagacgagggtaaagagagagtccaattctcaaagccaataggcagtagcgaaagctgcaagagaatgaaaatccgtggctcgcagcgcgcctaccg

SEQ ID NO: 207 - DNA, 219 bp, Artificial Sequence
  Description of Artificial Sequence: Synthetic polynucleotide
ctgaaattatacttatactcagtatatgacaaacaaaccactagatgacttacaactaatcggaaggtgcagagactcgacgggagctaccctaacgtcaagacgagggtaaagagagagtccaattctcaaagccaataggcagtagcgaaagctgcaagagaatgaaaatccgtggctcgcagcgcgcctaccgaaagccggcgtcgacgttagcgc

SEQ ID NO: 208 - DNA, 219 bp, Artificial Sequence
  Description of Artificial Sequence: Synthetic polynucleotide
ctgaaattatacttatactcagtatatgacaaacaaaccactagatgacttacaactaatcggaaggtgcagagactcgacgggagctaccctaacgtcaagacgagggtaaagagagagtccaattctcaaagccaataggcagtagcgaaagctgcaagagaatgaaaatccgtggatcgcagcataatatccgaaacgaggatacaagtgacatgc

SEQ ID NO: 209 - DNA, 219 bp, Artificial Sequence
  Description of Artificial Sequence: Synthetic polynucleotide
ctgaaattatacttatactcagtatatgacaaacaaaccactagatgacttacaactaatcggaaggtgcagagactcgacgggagctaccctaacgtcaagacgagggtaaagagagagtccaattctcaaagccaataggcagtagcgaaagctgcaagagaatgaaaatccgtgattcacaatctaaattacgaaacgataaatgataactctaac

SEQ ID NO: 210 - DNA, 156 bp, Artificial Sequence
  Description of Artificial Sequence: Synthetic polynucleotide
aaacaaaccactagatgacttacaactaatcggaaggtgcagagactcgacgggagctaccctaacgtcaagacgagggtaaagagagagtccaattctcaaagccaataggcagtagcgaaagctgcaagagaatgaaaatccgtggctcgcagc

SEQ ID NO: 211 - DNA, 161 bp, Artificial Sequence
  Description of Artificial Sequence: Synthetic polynucleotide
cgggcaaacaaacaaatagatgacttacaactaatcggaaggtgcagagactcgacgggagctaccctaacgtcaagacgagggtaaagagagagtccaattctcaaagccaataggcagtagcgaaagctgcaagagaatgaaaatccgtggctcgcagc

SEQ ID NO: 212 - DNA, 186 bp, Artificial Sequence
  Description of Artificial Sequence: Synthetic polynucleotide
cgctccgacgagcttccggccagtgcgagcaaacaaacaaatagatgacttacaactaatcggaaggtgcagagactcgacgggagctaccctaacgtcaagacgagggtaaagagagagtccaattctcaaagccaataggcagtagcgaaagctgcaagagaatgaaaatccgtggctcgcagc

SEQ ID NO: 213 - DNA, 57 bp, Artificial Sequence
  Description of Artificial Sequence: Synthetic oligonucleotide
aaacaaaccacggcagtagcgaaagctgcaagagaatgaaaatccgtggctcgcagc

SEQ ID NO: 214 - DNA, 67 bp, Artificial Sequence
  Description of Artificial Sequence: Synthetic oligonucleotide
agtatataagaaacaaaccacggcagtagcgaaagctgcaagagaatgaaaatccgtggctcgcagc

SEQ ID NO: 215 - DNA, 77 bp, Artificial Sequence
  Description of Artificial Sequence: Synthetic oligonucleotide
ctgaaattatacttatactcaaacaaaccacggcagtagcgaaagctgcaagagaatgaaaatccgtggctcgcagc

SEQ ID NO: 216 - DNA, 87 bp, Artificial Sequence
  Description of Artificial Sequence: Synthetic oligonucleotide
ctgaaattatacttatactcagtatatgacaaacaaaccacggcagtagcgaaagctgcaagagaatgaaaatccgtggctcgcagc

SEQ ID NO: 217 - DNA, 67 bp, Artificial Sequence
  Description of Artificial Sequence: Synthetic oligonucleotide
tagcgtcagcaaacaaacaaaggcagtagcgaaagctgcaagagaatgaaaatccgtggctcgcagc

SEQ ID NO: 218 - DNA, 77 bp, Artificial Sequence
  Description of Artificial Sequence: Synthetic oligonucleotide
atactcatactagcgtcagcaaacaaacaaaggcagtagcgaaagctgcaagagaatgaaaatccgtggctcgcagc

SEQ ID NO: 219 - DNA, 87 bp, Artificial Sequence
  Description of Artificial Sequence: Synthetic oligonucleotide
gtgtgaagctatactcatactagcgtcagcaaacaaacaaaggcagtagcgaaagctgcaagagaatgaaaatccgtggctcgcagc

SEQ ID NO: 220 - DNA, 67 bp, Artificial Sequence
  Description of Artificial Sequence: Synthetic oligonucleotide
cggtgcgagcaaacaaacaaaggcagtagcgaaagctgcaagagaatgaaaatccgtggctcgcagc

SEQ ID NO: 221 - DNA, 77 bp, Artificial Sequence
  Description of Artificial Sequence: Synthetic oligonucleotide
cgctccgacccagtgcgagcaaacaaacaaaggcagtagcgaaagctgcaagagaatgaaaatccgtggctcgcagc

SEQ ID NO: 222 - DNA, 87 bp, Artificial Sequence
  Description of Artificial Sequence: Synthetic oligonucleotide
cgctccgacgagcttccggccagtgcgagcaaacaaacaaaggcagtagcgaaagctgcaagagaatgaaaatccgtggctcgcagc

SEQ ID NO: 223 - DNA, 98 bp, Artificial Sequence
  Description of Artificial Sequence: Synthetic oligonucleotide
aaacaaaccacaagacgagggtaaagagagagtccaattctcaaagccaataggcagtagcgaaagctgcaagagaatgaaaatccgtggctcgcagc

SEQ ID NO: 224 - DNA, 108 bp, Artificial Sequence
  Description of Artificial Sequence: Synthetic polynucleotide
agtatataagaaacaaaccacaagacgagggtaaagagagagtccaattctcaaagccaataggcagtagcgaaagctgcaagagaatgaaaatccgtggctcgcagc

SEQ ID NO: 225 - DNA, 118 bp, Artificial Sequence
  Description of Artificial Sequence: Synthetic polynucleotide
ctgaaattatacttatactcaaacaaaccacaagacgagggtaaagagagagtccaattctcaaagccaataggcagtagcgaaagctgcaagagaatgaaaatccgtggctcgcagc

SEQ ID NO: 226 - DNA, 128 bp, Artificial Sequence
  Description of Artificial Sequence: Synthetic polynucleotide
ctgaaattatacttatactcagtatatgacaaacaaaccacaagacgagggtaaagagagagtccaattctcaaagccaataggcagtagcgaaagctgcaagagaatgaaaatccgtggctcgcagc

SEQ ID NO: 227 - DNA, 108 bp, Artificial Sequence
  Description of Artificial Sequence: Synthetic polynucleotide
tagcgtcagcaaacaaacaaaaagacgagggtaaagagagagtccaattctcaaagccaataggcagtagcgaaagctgcaagagaatgaaaatccgtggctcgcagc

SEQ ID NO: 228 - DNA, 118 bp, Artificial Sequence
  Description of Artificial Sequence: Synthetic polynucleotide
atactcatactagcgtcagcaaacaaacaaaaagacgagggtaaagagagagtccaattctcaaagccaataggcagtagcgaaagctgcaagagaatgaaaatccgtggctcgcagc

SEQ ID NO: 229 - DNA, 128 bp, Artificial Sequence
  Description of Artificial Sequence: Synthetic polynucleotide
gtgtgaagctatactcatactagcgtcagcaaacaaacaaaaagacgagggtaaagagagagtccaattctcaaagccaataggcagtagcgaaagctgcaagagaatgaaaatccgtggctcgcagc

SEQ ID NO: 230 - DNA, 108 bp, Artificial Sequence
  Description of Artificial Sequence: Synthetic polynucleotide
cggtgcgagcaaacaaacaaaaagacgagggtaaagagagagtccaattctcaaagccaataggcagtagcgaaagctgcaagagaatgaaaatccgtggctcgcagc

SEQ ID NO: 231 - DNA, 118 bp, Artificial Sequence
  Description of Artificial Sequence: Synthetic polynucleotide
cgctccgacccagtgcgagcaaacaaacaaaaagacgagggtaaagagagagtccaattctcaaagccaataggcagtagcgaaagctgcaagagaatgaaaatccgtggctcgcagc

SEQ ID NO: 232 - DNA, 128 bp, Artificial Sequence
  Description of Artificial Sequence: Synthetic polynucleotide
cgctccgacgagcttccggccagtgcgagcaaacaaacaaaaagacgagggtaaagagagagtccaattctcaaagccaataggcagtagcgaaagctgcaagagaatgaaaatccgtggctcgcagc

SEQ ID NO: 233 - DNA, 176 bp, Artificial Sequence
  Description of Artificial Sequence: Synthetic polynucleotide
ctgaaattatacttatactcagtatatgacaaacaaaccactagatgacttacaactaatcggaaggtgcagagactcgacgggagctaccctaacgtcaagacgagggtaaagagagagtccaattctcaaagccaataggcagtagcgaaagctgcaagagaatgaaaatccgt

SEQ ID NO: 234 - DNA, 77 bp, Artificial Sequence
  Description of Artificial Sequence: Synthetic oligonucleotide
ctgaaattatacttatactcagtatatgacaaacaaaccacggcagtagcgaaagctgcaagagaatgaaaatccgt

SEQ ID NO: 235 - DNA, 87 bp, Artificial Sequence
  Description of Artificial Sequence: Synthetic oligonucleotide
ctgaaattatacttatactcagtatatgacaaacaaaccacggcagtagcgaaagctgcaagagaatgaaaatccgtgattaaacag

SEQ ID NO: 236 - DNA, 97 bp, Artificial Sequence
  Description of Artificial Sequence: Synthetic oligonucleotide
ctgaaattatacttatactcagtatatgacaaacaaaccacggcagtagcgaaagctgcaagagaatgaaaatccgtgattcacaatataaattacg

SEQ ID NO: 237 - DNA, 87 bp, Artificial Sequence
  Description of Artificial Sequence: Synthetic oligonucleotide
ctgaaattatacttatactcagtatatgacaaacaaaccacggcagtagcgaaagctgcaagagaatgaaaatccgtggatcatagc

SEQ ID NO: 238 - DNA, 97 bp, Artificial Sequence
  Description of Artificial Sequence: Synthetic oligonucleotide
ctgaaattatacttatactcagtatatgacaaacaaaccacggcagtagcgaaagctgcaagagaatgaaaatccgtggatcgcagcataatatccg

SEQ ID NO: 239 - DNA, 97 bp, Artificial Sequence
  Description of Artificial Sequence: Synthetic oligonucleotide
ctgaaattatacttatactcagtatatgacaaacaaaccacggcagtagcgaaagctgcaagagaatgaaaatccgtggctcgcagcgcgcctaccg

SEQ ID NO: 240 - DNA, 118 bp, Artificial Sequence
  Description of Artificial Sequence: Synthetic polynucleotide
ctgaaattatacttatactcagtatatgacaaacaaaccacaagacgagggtaaagagagagtccaattctcaaagccaataggcagtagcgaaagctgcaagagaatgaaaatccgt

SEQ ID NO: 241 - DNA, 128 bp, Artificial Sequence
  Description of Artificial Sequence: Synthetic polynucleotide
ctgaaattatacttatactcagtatatgacaaacaaaccacaagacgagggtaaagagagagtccaattctcaaagccaataggcagtagcgaaagctgcaagagaatgaaaatccgtgattaaacag

SEQ ID NO: 242 - DNA, 138 bp, Artificial Sequence
  Description of Artificial Sequence: Synthetic polynucleotide
ctgaaattatacttatactcagtatatgacaaacaaaccacaagacgagggtaaagagagagtccaattctcaaagccaataggcagtagcgaaagctgcaagagaatgaaaatccgtgattcacaatataaattacg

SEQ ID NO: 243 - DNA, 128 bp, Artificial Sequence
  Description of Artificial Sequence: Synthetic polynucleotide
ctgaaattatacttatactcagtatatgacaaacaaaccacaagacgagggtaaagagagagtccaattctcaaagccaataggcagtagcgaaagctgcaagagaatgaaaatccgtggatcatagc

SEQ ID NO: 244 - DNA, 138 bp, Artificial Sequence
  Description of Artificial Sequence: Synthetic polynucleotide
ctgaaattatacttatactcagtatatgacaaacaaaccacaagacgagggtaaagagagagtccaattctcaaagccaataggcagtagcgaaagctgcaagagaatgaaaatccgtggatcgcagcataatatccg

SEQ ID NO: 245 - DNA, 138 bp, Artificial Sequence
  Description of Artificial Sequence: Synthetic polynucleotide
ctgaaattatacttatactcagtatatgacaaacaaaccacaagacgagggtaaagagagagtccaattctcaaagccaataggcagtagcgaaagctgcaagagaatgaaaatccgtggctcgcagcgcgcctaccg

SEQ ID NO: 246 - DNA, 162 bp, Artificial Sequence
  Description of Artificial Sequence: Synthetic polynucleotide
gctgcgagccacggacttaaataattgagccttaaagaagaaattctttaagtggatgctctcaaactcagggaaacctaaatctagttatagacaaggcaatcctgagccaagccgaagtagtaattagtaagttaacaacacaaacacaacttatatact

SEQ ID NO: 247 - DNA, 172 bp, Artificial Sequence
  Description of Artificial Sequence: Synthetic polynucleotide
gctgcgagccacggacttaaataattgagccttaaagaagaaattctttaagtggatgctctcaaactcagggaaacctaaatctagttatagacaaggcaatcctgagccaagccgaagtagtaattagtaagttaacaacacaaacacaagagtataagtataatttcag

SEQ ID NO: 248 - DNA, 182 bp, Artificial Sequence
  Description of Artificial Sequence: Synthetic polynucleotide
gctgcgagccacggacttaaataattgagccttaaagaagaaattctttaagtggatgctctcaaactcagggaaacctaaatctagttatagacaaggcaatcctgagccaagccgaagtagtaattagtaagttaacaacacaaacacaagtcatatactgagtataagtataatttcag

SEQ ID NO: 249 - DNA, 192 bp, Artificial Sequence
  Description of Artificial Sequence: Synthetic polynucleotide
gctgcgagccacggacttaaataattgagccttaaagaagaaattctttaagtggatgctctcaaactcagggaaacctaaatctagttatagacaaggcaatcctgagccaagccgaagtagtaattagtaagttaacaacacaaacacaagtcatatactgagtataagtataatttcatattgttgatg

SEQ ID NO: 250 - DNA, 202 bp, Artificial Sequence
  Description of Artificial Sequence: Synthetic polynucleotide
gctgcgagccacggacttaaataattgagccttaaagaagaaattctttaagtggatgctctcaaactcagggaaacctaaatctagttatagacaaggcaatcctgagccaagccgaagtagtaattagtaagttaacaacacaaacacaagcgataatgcttcatatactgagtataagtatagtttcatattgttgatg

SEQ ID NO: 251 - DNA, 162 bp, Artificial Sequence
  Description of Artificial Sequence: Synthetic polynucleotide
gctgcgagccacggacttaaataattgagccttaaagaagaaattctttaagtggatgctctcaaactcagggaaacctaaatctagttatagacaaggcaatcctgagccaagccgaagtagtaattagtaagttaacaaaacaaaaacaagctgacgcta

SEQ ID NO: 252 - DNA, 172 bp, Artificial Sequence
  Description of Artificial Sequence: Synthetic polynucleotide
gctgcgagccacggacttaaataattgagccttaaagaagaaattctttaagtggatgctctcaaactcagggaaacctaaatctagttatagacaaggcaatcctgagccaagccgaagtagtaattagtaagttaacaaaacaaaaacaagctgacgctagtatgagtat

SEQ ID NO: 253 - DNA, 182 bp, Artificial Sequence
  Description of Artificial Sequence: Synthetic polynucleotide
gctgcgagccacggacttaaataattgagccttaaagaagaaattctttaagtggatgctctcaaactcagggaaacctaaatctagttatagacaaggcaatcctgagccaagccgaagtagtaattagtaagttaacaaaacaaaaacaagctgacgctagtatgagtatagcttcacac

SEQ ID NO: 254 - DNA, 192 bp, Artificial Sequence
  Description of Artificial Sequence: Synthetic polynucleotide
gctgcgagccacggacttaaataattgagccttaaagaagaaattctttaagtggatgctctcaaactcagggaaacctaaatctagttatagacaaggcaatcctgagccaagccgaagtagtaattagtaagttaacaaaacaaaaacaagctgacgctagtatgagtatagcttcacactcaggtgagg

SEQ ID NO: 255 - DNA, 202 bp, Artificial Sequence
  Description of Artificial Sequence: Synthetic polynucleotide
gctgcgagccacggacttaaataattgagccttaaagaagaaattctttaagtggatgctctcaaactcagggaaacctaaatctagttatagacaaggcaatcctgagccaagccgaagtagtaattagtaagttaacaaaacaaaaacaagctgacgctagtatgagtatagcttcacactcaggtgaggcatcattcgg

SEQ ID NO: 256 - DNA, 162 bp, Artificial Sequence
  Description of Artificial Sequence: Synthetic polynucleotide
gctgcgagccacggacttaaataattgagccttaaagaagaaattctttaagtggatgctctcaaactcagggaaacctaaatctagttatagacaaggcaatcctgagccaagccgaagtagtaattagtaagttaacaaaacaaaaacaagctcgcaccg

SEQ ID NO: 257 - DNA, 172 bp, Artificial Sequence
  Description of Artificial Sequence: Synthetic polynucleotide
gctgcgagccacggacttaaataattgagccttaaagaagaaattctttaagtggatgctctcaaactcagggaaacctaaatctagttatagacaaggcaatcctgagccaagccgaagtagtaattagtaagttaacaaaacaaaaacaagctcgcactgggtcggagcg

SEQ ID NO: 258 - DNA, 182 bp, Artificial Sequence; identical to SEQ ID NO: 248
  Description of Artificial Sequence: Synthetic polynucleotide

SEQ ID NO: 259 - DNA, 182 bp, Artificial Sequence; identical to SEQ ID NO: 248
  Description of Artificial Sequence: Synthetic polynucleotide

SEQ ID NO: 260 - DNA, 182 bp, Artificial Sequence; identical to SEQ ID NO: 248
  Description of Artificial Sequence: Synthetic polynucleotide

SEQ ID NO: 261 - DNA, 182 bp, Artificial Sequence; identical to SEQ ID NO: 248
  Description of Artificial Sequence: Synthetic polynucleotide

SEQ ID NO: 262 - DNA, 182 bp, Artificial Sequence
  Description of Artificial Sequence: Synthetic polynucleotide
gctgcgagccacggacttaaataattgagccttaaagaagaaattctttaagtggatgctctcaaactcagggaaacctaaatctagttatagacaaggcaatcctgagccaagccgaagtagtaattagtaagttaacaacacaaacacaagtaacttagagagtataagtataatttcag

SEQ ID NO: 263 - DNA, 182 bp, Artificial Sequence
  Description of Artificial Sequence: Synthetic polynucleotide
gctgcgagccacggacttaaataattgagccttaaagaagaaattctttaagtggatgctctcaaactcagggaaacctaaatctagttatagacaaggcaatcctgagccaagccgaagtagtaattagtaagttaacaacacaaacacaagtaacttagatgtaacacacataatttcag

SEQ ID NO: 264 - DNA, 182 bp, Artificial Sequence
  Description of Artificial Sequence: Synthetic polynucleotide
gctgcgagccacggacttaaataattgagccttaaagaagaaattctttaagtggatgctctcaaactcagggaaacctaaatctagttatagacaaggcaatcctgagccaagccgaagtagtaattagtaagttaacaacacaaacacaagtaacttagatgtaacacacaccgatcaac

SEQ ID NO: 265 - DNA, 182 bp, Artificial Sequence
  Description of Artificial Sequence: Synthetic polynucleotide
ctgtttaatcacggacttaaataattgagccttaaagaagaaattctttaagtggatgctctcaaactcagggaaacctaaatctagttatagacaaggcaatcctgagccaagccgaagtagtaattagtaagttaacaacacaaacacaagtcatatactgagtataagtataatttcag

SEQ ID NO: 266 - DNA, 192 bp, Artificial Sequence
  Description of Artificial Sequence: Synthetic polynucleotide
cgtaatttatattgtgaatcacggacttaaataattgagccttaaagaagaaattctttaagtggatgctctcaaactcagggaaacctaaatctagttatagacaaggcaatcctgagccaagccgaagtagtaattagtaagttaacaacacaaacacaagtcatatactgagtataagtataatttcag

SEQ ID NO: 267 - DNA, 182 bp, Artificial Sequence
  Description of Artificial Sequence: Synthetic polynucleotide
gctatgatccacggacttaaataattgagccttaaagaagaaattctttaagtggatgctctcaaactcagggaaacctaaatctagttatagacaaggcaatcctgagccaagccgaagtagtaattagtaagttaacaacacaaacacaagtcatatactgagtataagtataatttcag

SEQ ID NO: 268 - DNA, 192 bp, Artificial Sequence
  Description of Artificial Sequence: Synthetic polynucleotide
cggatattatgctgcgatccacggacttaaataattgagccttaaagaagaaattctttaagtggatgctctcaaactcagggaaacctaaatctagttatagacaaggcaatcctgagccaagccgaagtagtaattagtaagttaacaacacaaacacaagtcatatactgagtataagtataatttcag

SEQ ID NO: 269 - DNA, 192 bp, Artificial Sequence
  Description of Artificial Sequence: Synthetic polynucleotide
cggtaggcgcgctgcgagccacggacttaaataattgagccttaaagaagaaattctttaagtggatgctctcaaactcagggaaacctaaatctagttatagacaaggcaatcctgagccaagccgaagtagtaattagtaagttaacaacacaaacacaagtcatatactgagtataagtataatttcag

SEQ ID NO: 270 - DNA, 215 bp, Artificial Sequence
  Description of Artificial Sequence: Synthetic polynucleotide
gcgctaacgtcgacgccggcaaacggtaggcgcgctgcgagccacggacttaaataattgagccttaaagaagaaattctttaagtggatgctctcaaactcagggaaacctaaatctagttatagacaaggcaatcctgagccaagccgaagtagtaattagtaagttaacaacacaaacacaagtcatatactgagtataagtataatttcag

SEQ ID NO: 271 - DNA, 215 bp, Artificial Sequence
  Description of Artificial Sequence: Synthetic polynucleotide
gcatgtcacttgtatcctcgaaacggatattatgctgcgatccacggacttaaataattgagccttaaagaagaaattctttaagtggatgctctcaaactcagggaaacctaaatctagttatagacaaggcaatcctgagccaagccgaagtagtaattagtaagttaacaacacaaacacaagtcatatactgagtataagtataatttcag

SEQ ID NO: 272 - DNA, 215 bp, Artificial Sequence
  Description of Artificial Sequence: Synthetic polynucleotide
gttagagttatcatttatcgaaacgtaatttagattgtgaatcacggacttaaataattgagccttaaagaagaaattctttaagtggatgctctcaaactcagggaaacctaaatctagttatagacaaggcaatcctgagccaagccgaagtagtaattagtaagttaacaacacaaacacaagtcatatactgagtataagtataatttcag

SEQ ID NO: 273 - DNA, 152 bp, Artificial Sequence
  Description of Artificial Sequence: Synthetic polynucleotide
gctgcgagccacggacttaaataattgagccttaaagaagaaattctttaagtggatgctctcaaactcagggaaacctaaatctagttatagacaaggcaatcctgagccaagccgaagtagtaattagtaagttaacaacacaaacacaa

SEQ ID NO: 274 - DNA, 157 bp, Artificial Sequence
  Description of Artificial Sequence: Synthetic polynucleotide
gctgcgagccacggacttaaataattgagccttaaagaagaaattctttaagtggatgctctcaaactcagggaaacctaaatctagttatagacaaggcaatcctgagccaagccgaagtagtaattagtaagttaacaaaacaaaaacaagcccg

SEQ ID NO: 275 - DNA, 182 bp, Artificial Sequence
  Description of Artificial Sequence: Synthetic polynucleotide
gctgcgagccacggacttaaataattgagccttaaagaagaaattctttaagtggatgctctcaaactcagggaaacctaaatctagttatagacaaggcaatcctgagccaagccgaagtagtaattagtaagttaacaaaacaaaaacaagctcgcactggccggaagctcgtcggagcg

SEQ ID NO: 276 - DNA, 251 bp, Artificial Sequence
  Description of Artificial Sequence: Synthetic polynucleotide
gctgcgagccacggacttaaataattgagccttaaagaagaaattctttaagtggatgctctcaaactcagggaaacctaaatctagttatagacaaggcaatcctgagccaagccgaagtagtaattagtaagttaacaatagatgacttacaactaatcggaaggtgcagagactcgacgggagctaccctaacgtcaagacgagggtaaagagagagtccaattctcaaagccaatacacaaacacaa

SEQ ID NO: 277 - DNA, 261 bp, Artificial Sequence
  Description of Artificial Sequence: Synthetic polynucleotide
gctgcgagccacggacttaaataattgagccttaaagaagaaattctttaagtggatgctctcaaactcagggaaacctaaatctagttatagacaaggcaatcctgagccaagccgaagtagtaattagtaagttaacaatagatgacttacaactaatcggaaggtgcagagactcgacgggagctaccctaacgtcaagacgagggtaaagagagagtccaattctcaaagccaatacacaaacacaacttatatact

SEQ ID NO: 278 - DNA, 271 bp, Artificial Sequence
  Description of Artificial Sequence: Synthetic polynucleotide
gctgcgagccacggacttaaataattgagccttaaagaagaaattctttaagtggatgctctcaaactcagggaaacctaaatctagttatagacaaggcaatcctgagccaagccgaagtagtaattagtaagttaacaatagatgacttacaactaatcggaaggtgcagagactcgacgggagctaccctaacgtcaagacgagggtaaagagagagtccaattctcaaagccaatacacaaacacaagagtataagtataatttcag

SEQ ID NO: 279 - DNA, 281 bp, Artificial Sequence
  Description of Artificial Sequence: Synthetic polynucleotide
gctgcgagccacggacttaaataattgagccttaaagaagaaattctttaagtggatgctctcaaactcagggaaacctaaatctagttatagacaaggcaatcctgagccaagccgaagtagtaattagtaagttaacaatagatgacttacaactaatcggaaggtgcagagactcgacgggagctaccctaacgtcaagacgagggtaaagagagagtccaattctcaaagccaatacacaaacacaagtcatatactgagtataagtataatttcag

SEQ ID NO: 280 - DNA, 261 bp, Artificial Sequence
  Description of Artificial Sequence: Synthetic polynucleotide
gctgcgagccacggacttaaataattgagccttaaagaagaaattctttaagtggatgctctcaaactcagggaaacctaaatctagttatagacaaggcaatcctgagccaagccgaagtagtaattagtaagttaacaatagatgacttacaactaatcggaaggtgcagagactcgacgggagctaccctaacgtcaagacgagggtaaagagagagtccaattctcaaagccaataaacaaaaacaagctgacgcta

SEQ ID NO: 281 - DNA, 271 bp, Artificial Sequence
  Description of Artificial Sequence: Synthetic polynucleotide
gctgcgagccacggacttaaataattgagccttaaagaagaaattctttaagtggatgctctcaaactcagggaaacctaaatctagttatagacaaggcaatcctgagccaagccgaagtagtaattagtaagttaacaatagatgacttacaactaatcggaaggtgcagagactcgacgggagctaccctaacgtcaagacgagggtaaagagagagtccaattctcaaagccaataaacaaaaacaagctgacgctagtatgagtat

SEQ ID NO: 282 - DNA, 281 bp, Artificial Sequence
  Description of Artificial Sequence: Synthetic polynucleotide
gctgcgagccacggacttaaataattgagccttaaagaagaaattctttaagtggatgctctcaaactcagggaaacctaaatctagttatagacaaggcaatcctgagccaagccgaagtagtaattagtaagttaacaatagatgacttacaactaatcggaaggtgcagagactcgacgggagctaccctaacgtcaagacgagggtaaagagagagtccaattctcaaagccaataaacaaaaacaagctgacgctagtatgagtatagcttcacac

SEQ ID NO: 283 - DNA, 261 bp, Artificial Sequence
  Description of Artificial Sequence: Synthetic polynucleotide
gctgcgagccacggacttaaataattgagccttaaagaagaaattctttaagtggatgctctcaaactcagggaaacctaaatctagttatagacaaggcaatcctgagccaagccgaagtagtaattagtaagttaacaatagatgacttacaactaatcggaaggtgcagagactcgacgggagctaccctaacgtcaagacgagggtaaagagagagtccaattctcaaagccaataaacaaaaacaagctcgcaccg

SEQ ID NO: 284 - DNA, 271 bp, Artificial Sequence
  Description of Artificial Sequence: Synthetic polynucleotide
gctgcgagccacggacttaaataattgagccttaaagaagaaattctttaagtggatgctctcaaactcagggaaacctaaatctagttatagacaaggcaatcctgagccaagccgaagtagtaattagtaagttaacaatagatgacttacaactaatcggaaggtgcagagactcgacgggagctaccctaacgtcaagacgagggtaaagagagagtccaattctcaaagccaataaacaaaaacaagctcgcactgggtcggagcg

SEQ ID NO: 285 - DNA, 281 bp, Artificial Sequence
  Description of Artificial Sequence: Synthetic polynucleotide
gctgcgagccacggacttaaataattgagccttaaagaagaaattctttaagtggatgctctcaaactcagggaaacctaaatctagttatagacaaggcaatcctgagccaagccgaagtagtaattagtaagttaacaatagatgacttacaactaatcggaaggtgcagagactcgacgggagctaccctaacgtcaagacgagggtaaagagagagtccaattctcaaagccaataaacaaaaacaagctcgcactggccggaagctcgtcggagcg

SEQ ID NO: 286 - DNA, 210 bp, Artificial Sequence
  Description of Artificial Sequence: Synthetic polynucleotide
gctgcgagccacggacttaaataattgagccttaaagaagaaattctttaagtggatgctctcaaactcagggaaacctaaatctagttatagacaaggcaatcctgagccaagccgaagtagtaattagtaagttaacaatagatgacttacaactaatcggaaggtgcagagactcgacgggagctaccctaacgtccacaaacacaa

SEQ ID NO: 287 - DNA, 220 bp, Artificial Sequence
  Description of Artificial Sequence: Synthetic polynucleotide
gctgcgagccacggacttaaataattgagccttaaagaagaaattctttaagtggatgctctcaaactcagggaaacctaaatctagttatagacaaggcaatcctgagccaagccgaagtagtaattagtaagttaacaatagatgacttacaactaatcggaaggtgcagagactcgacgggagctaccctaacgtccacaaacacaacttatatact

SEQ ID NO: 288 - DNA, 230 bp, Artificial Sequence
  Description of Artificial Sequence: Synthetic polynucleotide
gctgcgagccacggacttaaataattgagccttaaagaagaaattctttaagtggatgctctcaaactcagggaaacctaaatctagttatagacaaggcaatcctgagccaagccgaagtagtaattagtaagttaacaatagatgacttacaactaatcggaaggtgcagagactcgacgggagctaccctaacgtccacaaacacaagagtataagtataatttcag

SEQ ID NO: 289 - DNA, 240 bp, Artificial Sequence
  Description of Artificial Sequence: Synthetic polynucleotide
gctgcgagccacggacttaaataattgagccttaaagaagaaattctttaagtggatgctctcaaactcagggaaacctaaatctagttatagacaaggcaatcctgagccaagccgaagtagtaattagtaagttaacaatagatgacttacaactaatcggaaggtgcagagactcgacgggagctaccctaacgtccacaaacacaagtcatatactgagtataagtataatttcag

SEQ ID NO: 290 - DNA, 220 bp, Artificial Sequence
  Description of Artificial Sequence: Synthetic polynucleotide
gctgcgagccacggacttaaataattgagccttaaagaagaaattctttaagtggatgctctcaaactcagggaaacctaaatctagttatagacaaggcaatcctgagccaagccgaagtagtaattagtaagttaacaatagatgacttacaactaatcggaaggtgcagagactcgacgggagctaccctaacgtcaacaaaaacaagctgacgcta

SEQ ID NO: 291 - DNA, 230 bp, Artificial Sequence
  Description of Artificial Sequence: Synthetic polynucleotide
gctgcgagccacggacttaaataattgagccttaaagaagaaattctttaagtggatgctctcaaactcagggaaacctaaatctagttatagacaaggcaatcctgagccaagccgaagtagtaattagtaagttaacaatagatgacttacaactaatcggaaggtgcagagactcgacgggagctaccctaacgtcaacaaaaacaagctgacgctagtatgagtat

SEQ ID NO: 292 - DNA, 240 bp, Artificial Sequence
  Description of Artificial Sequence: Synthetic polynucleotide
gctgcgagccacggacttaaataattgagccttaaagaagaaattctttaagtggatgctctcaaactcagggaaacctaaatctagttatagacaaggcaatcctgagccaagccgaagtagtaattagtaagttaacaatagatgacttacaactaatcggaaggtgcagagactcgacgggagctaccctaacgtcaacaaaaacaagctgacgctagtatgagtatagcttcacac

SEQ ID NO: 293 - DNA, 220 bp, Artificial Sequence
  Description of Artificial Sequence: Synthetic polynucleotide
gctgcgagccacggacttaaataattgagccttaaagaagaaattctttaagtggatgctctcaaactcagggaaacctaaatctagttatagacaaggcaatcctgagccaagccgaagtagtaattagtaagttaacaatagatgacttacaactaatcggaaggtgcagagactcgacgggagctaccctaacgtcaacaaaaacaagctcgcaccg

SEQ ID NO: 294 - DNA, 230 bp, Artificial Sequence
  Description of Artificial Sequence: Synthetic polynucleotide
gctgcgagccacggacttaaataattgagccttaaagaagaaattctttaagtggatgctctcaaactcagggaaacctaaatctagttatagacaaggcaatcctgagccaagccgaagtagtaattagtaagttaacaatagatgacttacaactaatcggaaggtgcagagactcgacgggagctaccctaacgtcaacaaaaacaagctcgcactgggtcggagcg

SEQ ID NO: 295 - DNA, 240 bp, Artificial Sequence
  Description of Artificial Sequence: Synthetic polynucleotide
gctgcgagccacggacttaaataattgagccttaaagaagaaattctttaagtggatgctctcaaactcagggaaacctaaatctagttatagacaaggcaatcctgagccaagccgaagtagtaattagtaagttaacaatagatgacttacaactaatcggaaggtgcagagactcgacgggagctaccctaacgtcaacaaaaacaagctcgcactggccggaagctcgtcggagcg

SEQ ID NO: 296 - DNA, 172 bp, Artificial Sequence
  Description of Artificial Sequence: Synthetic polynucleotide
acggacttaaataattgagccttaaagaagaaattctttaagtggatgctctcaaactcagggaaacctaaatctagttatagacaaggcaatcctgagccaagccgaagtagtaattagtaagttaacaacacaaacacaagtcatatactgagtataagtataatttcag

SEQ ID NO: 297 - DNA, 271 bp, Artificial Sequence
  Description of Artificial Sequence: Synthetic polynucleotide
acggacttaaataattgagccttaaagaagaaattctttaagtggatgctctcaaactcagggaaacctaaatctagttatagacaaggcaatcctgagccaagccgaagtagtaattagtaagttaacaatagatgacttacaactaatcggaaggtgcagagactcgacgggagctaccctaacgtcaagacgagggtaaagagagagtccaattctcaaagccaatacacaaacacaagtcatatactgagtataagtataatttcag

SEQ ID NO: 298 - DNA, 281 bp, Artificial Sequence
  Description of Artificial Sequence: Synthetic polynucleotide
ctgtttaatcacggacttaaataattgagccttaaagaagaaattctttaagtggatgctctcaaactcagggaaacctaaatctagttatagacaaggcaatcctgagccaagccgaagtagtaattagtaagttaacaatagatgacttacaactaatcggaaggtgcagagactcgacgggagctaccctaacgtcaagacgagggtaaagagagagtccaattctcaaagccaatacacaaacacaagtcatatactgagtataagtataatttcag

SEQ ID NO: 299 - DNA, 291 bp, Artificial Sequence
  Description of Artificial Sequence: Synthetic polynucleotide
cgtaatttatattgtgaatcacggacttaaataattgagccttaaagaagaaattctttaagtggatgctctcaaactcagggaaacctaaatctagttatagacaaggcaatcctgagccaagccgaagtagtaattagtaagttaacaatagatgacttacaactaatcggaaggtgcagagactcgacgggagctaccctaacgtcaagacgagggtaaagagagagtccaattctcaaagccaatacacaaacacaagtcatatactgagtataagtataatttcag

SEQ ID NO: 300 - DNA, 281 bp, Artificial Sequence
  Description of Artificial Sequence: Synthetic polynucleotide
gctatgatccacggacttaaataattgagccttaaagaagaaattctttaagtggatgctctcaaactcagggaaacctaaatctagttatagacaaggcaatcctgagccaagccgaagtagtaattagtaagttaacaatagatgacttacaactaatcggaaggtgcagagactcgacgggagctaccctaacgtcaagacgagggtaaagagagagtccaattctcaaagccaatacacaaacacaagtcatatactgagtataagtataatttcag

SEQ ID NO: 301 - DNA, 291 bp, Artificial Sequence
  Description of Artificial Sequence: Synthetic polynucleotide
cggatattatgctgcgatccacggacttaaataattgagccttaaagaagaaattctttaagtggatgctctcaaactcagggaaacctaaatctagttatagacaaggcaatcctgagccaagccgaagtagtaattagtaagttaacaatagatgacttacaactaatcggaaggtgcagagactcgacgggagctaccctaacgtcaagacgagggtaaagagagagtccaattctcaaagccaatacacaaacacaagtcatatactgagtataagtataatttcag

SEQ ID NO: 302 - DNA, 291 bp, Artificial Sequence
  Description of Artificial Sequence: Synthetic polynucleotide
cggtaggcgcgctgcgagccacggacttaaataattgagccttaaagaagaaattctttaagtggatgctctcaaactcagggaaacctaaatctagttatagacaaggcaatcctgagccaagccgaagtagtaattagtaagttaacaatagatgacttacaactaatcggaaggtgcagagactcgacgggagctaccctaacgtcaagacgagggtaaagagagagtccaattctcaaagccaatacacaaacacaagtcatatactgagtataagtataatttcag

SEQ ID NO: 303 - DNA, 230 bp, Artificial Sequence
  Description of Artificial Sequence: Synthetic polynucleotide
acggacttaaataattgagccttaaagaagaaattctttaagtggatgctctcaaactcagggaaacctaaatctagttatagacaaggcaatcctgagccaagccgaagtagtaattagtaagttaacaatagatgacttacaactaatcggaaggtgcagagactcgacgggagctaccctaacgtccacaaacacaagtcatatactgagtataagtataatttcag

SEQ ID NO: 304 - DNA, 240 bp, Artificial Sequence
  Description of Artificial Sequence: Synthetic polynucleotide
ctgtttaatcacggacttaaataattgagccttaaagaagaaattctttaagtggatgctctcaaactcagggaaacctaaatctagttatagacaaggcaatcctgagccaagccgaagtagtaattagtaagttaacaatagatgacttacaactaatcggaaggtgcagagactcgacgggagctaccctaacgtccacaaacacaagtcatatactgagtataagtataatttcag

SEQ ID NO: 305 - DNA, 250 bp, Artificial Sequence
  Description of Artificial Sequence: Synthetic polynucleotide
cgtaatttatattgtgaatcacggacttaaataattgagccttaaagaagaaattctttaagtggatgctctcaaactcagggaaacctaaatctagttatagacaaggcaatcctgagccaagccgaagtagtaattagtaagttaacaatagatgacttacaactaatcggaaggtgcagagactcgacgggagctaccctaacgtccacaaacacaagtcatatactgagtataagtataatttcag

SEQ ID NO: 306 - DNA, 240 bp, Artificial Sequence
  Description of Artificial Sequence: Synthetic polynucleotide
gctatgatccacggacttaaataattgagccttaaagaagaaattctttaagtggatgctctcaaactcagggaaacctaaatctagttatagacaaggcaatcctgagccaagccgaagtagtaattagtaagttaacaatagatgacttacaactaatcggaaggtgcagagactcgacgggagctaccctaacgtccacaaacacaagtcatatactgagtataagtataatttcag

SEQ ID NO: 307 - DNA, 250 bp, Artificial Sequence
  Description of Artificial Sequence: Synthetic polynucleotide
cggatattatgctgcgatccacggacttaaataattgagccttaaagaagaaattctttaagtggatgctctcaaactcagggaaacctaaatctagttatagacaaggcaatcctgagccaagccgaagtagtaattagtaagttaacaatagatgacttacaactaatcggaaggtgcagagactcgacgggagctaccctaacgtccacaaacacaagtcatatactgagtataagtataatttcag

SEQ ID NO: 308 - DNA, 250 bp, Artificial Sequence
  Description of Artificial Sequence: Synthetic polynucleotide
cggtaggcgcgctgcgagccacggacttaaataattgagccttaaagaagaaattctttaagtggatgctctcaaactcagggaaacctaaatctagttatagacaaggcaatcctgagccaagccgaagtagtaattagtaagttaacaatagatgacttacaactaatcggaaggtgcagagactcgacgggagctaccctaacgtccacaaacacaagtcatatactgagtataagtataatttcag

SEQ ID NO: 309 - DNA, 1137 bp, Artificial Sequence
  Description of Artificial Sequence: Synthetic polynucleotide
atgctgctgctggtcacatctctgctgctgtgcgagctgccccatcctgcctttctgctgatccccgacatccagatgacccagaccacaagcagcctgtctgccagcctgggcgatagagtgaccatcagctgtagagccagccaggacatcagcaagtacctgaactggtatcagcaaaagcccgacggcaccgtgaagctgctgatctaccacaccagcagactgcacagcggcgtgccaagcagattttctggcagcggctctggcaccgactacagcctgacaatcagcaacctggaacaagaggatatcgctacctacttctgccagcaaggcaacaccctgccttacacctttggcggaggcaccaagctggaaatcaccggctctacaagcggcagcggcaaacctggatctggcgagggatctaccaagggcgaagtgaaactgcaagagtctggccctggactggtggccccatctcagtctctgagcgtgacctgtacagtcagcggagtgtccctgcctgattacggcgtgtcctggatcagacagcctcctcggaaaggcctggaatggctgggagtgatctggggcagcgagacaacctactacaacagcgccctgaagtcccggctgaccatcatcaaggacaactccaagagccaggtgttcctgaagatgaacagcctgcagaccgacgacaccgccatctactattgcgccaagcactactactacggcggcagctacgccatggattattggggccagggcaccagcgtgaccgtttcttctgccgccgctatcgaagtgatgtaccctcctccttacctggacaacgagaagtccaacggcaccatcatccacgtgaagggcaagcacctgtgtccttctccactgttccccggacctagcaagcctttctgggtgctcgttgttgttggcggcgtgctggcctgttacagcctgctggttaccgtggccttcatcatcttttgggtcaagagaggccggaagaaacttctttatatattcaagcagccctttatgcgacccgttcagactacccaagaggaagatggatgcagttgccgctttccagaagaggaggagggcgggtgcgaactgtaa

SEQ ID NO: 310 - DNA, 1134 bp, Artificial Sequence
  Description of Artificial Sequence: Synthetic polynucleotide
atgctgctgctggtcacatctctgctgctgtgcgagctgccccatcctgcctttctgctgatccccgacatccagatgacccagaccacaagcagcctgtctgccagcctgggcgatagagtgaccatcagctgtagagccagccaggacatcagcaagtacctgaactggtatcagcaaaagcccgacggcaccgtgaagctgctgatctaccacaccagcagactgcacagcggcgtgccaagcagattttctggcagcggctctggcaccgactacagcctgacaatcagcaacctggaacaagaggatatcgctacctacttctgccagcaaggcaacaccctgccttacacctttggcggaggcaccaagctggaaatcaccggctctacaagcggcagcggcaaacctggatctggcgagggatctaccaagggcgaagtgaaactgcaagagtctggccctggactggtggccccatctcagtctctgagcgtgacctgtacagtcagcggagtgtccctgcctgattacggcgtgtcctggatcagacagcctcctcggaaaggcctggaatggctgggagtgatctggggcagcgagacaacctactacaacagcgccctgaagtcccggctgaccatcatcaaggacaactccaagagccaggtgttcctgaagatgaacagcctgcagaccgacgacaccgccatctactattgcgccaagcactactactacggcggcagctacgccatggattattggggccagggcaccagcgtgaccgtttcttctgccgccgctatcgaagtgatgtaccctcctccttacctggacaacgagaagtccaacggcaccatcatccacgtgaagggcaagcacctgtgtccttctccactgttccccggacctagcaagcctttctgggtgctcgttgttgttggcggcgtgctggcctgttacagcctgctggttaccgtggccttcatcatcttttgggtccgaagcaagcggagccggctgctgcactccgactacatgaacatgacccctagacggcccggaccaaccagaaagcactaccagccttacgctcctcctagagacttcgccgcctaccggtcctaa

SEQ ID NO: 311 - DNA, 1470 bp, Artificial Sequence
  Description of Artificial Sequence: Synthetic polynucleotide
atgctgctgctggtcacatctctgctgctgtgcgagctgccccatcctgcctttctgctgatccccgacatccagatgacccagaccacaagcagcctgtctgccagcctgggcgatagagtgaccatcagctgtagagccagccaggacatcagcaagtacctgaactggtatcagcaaaagcccgacggcaccgtgaagctgctgatctaccacaccagcagactgcacagcggcgtgccaagcagattttctggcagcggctctggcaccgactacagcctgacaatcagcaacctggaacaagaggatatcgctacctacttctgccagcaaggcaacaccctgccttacacctttggcggaggcaccaagctggaaatcaccggctctacaagcggcagcggcaaacctggatctggcgagggatctaccaagggcgaagtgaaactgcaagagtctggccctggactggtggccccatctcagtctctgagcgtgacctgtacagtcagcggagtgtccctgcctgattacggcgtgtcctggatcagacagcctcctcggaaaggcctggaatggctgggagtgatctggggcagcgagacaacctactacaacagcgccctgaagtcccggctgaccatcatcaaggacaactccaagagccaggtgttcctgaagatgaacagcctgcagaccgacgacaccgccatctactattgcgccaagcactactactacggcggcagctacgccatggattattggggccagggcaccagcgtgaccgtttcttctgccgccgctatcgaagtgatgtaccctcctccttacctggacaacgagaagtccaacggcaccatcatccacgtgaagggcaagcacctgtgtccttctccactgttccccggacctagcaagcctttctgggtgctcgttgttgttggcggcgtgctggcctgttacagcctgctggttaccgtggccttcatcatcttttgggtccgaagcaagcggagccggctgctgcactccgactacatgaacatgacccctagacggcccggaccaaccagaaagcactaccagccttacgctcctcctagagacttcgccgcctaccggtccagagtgaagttcagcagatccgccgatgctcccgcctatcagcagggccaaaaccagctgtacaacgagctgaacctggggagaagagaagagtacgacgtgctggacaagcggagaggcagagatcctgaaatgggcggcaagcccagacggaagaatcctcaagagggcctgtataatgagctgcagaaagacaagatggccgaggcctacagcgagatcggaatgaagggcgagcgcagaagaggcaagggacacgatggactgtaccagggactgagcaccgccaccaaggatacctatgacgccctgcacatgcaggccctgcctccaagataa

SEQ ID NO: 312 - DNA, 1347 bp, Artificial Sequence
  Description of Artificial Sequence: Synthetic polynucleotide
atgctgctgctggtcacatctctgctgctgtgcgagctgccccatcctgcctttctgctgatccccgacatccagatgacccagaccacaagcagcctgtctgccagcctgggcgatagagtgaccatcagctgtagagccagccaggacatcagcaagtacctgaactggtatcagcaaaagcccgacggcaccgtgaagctgctgatctaccacaccagcagactgcacagcggcgtgccaagcagattttctggcagcggctctggcaccgactacagcctgacaatcagcaacctggaacaagaggatatcgctacctacttctgccagcaaggcaacaccctgccttacacctttggcggaggcaccaagctggaaatcaccggctctacaagcggcagcggcaaacctggatctggcgagggatctaccaagggcgaagtgaaactgcaagagtctggccctggactggtggccccatctcagtctctgagcgtgacctgtacagtcagcggagtgtccctgcctgattacggcgtgtcctggatcagacagcctcctcggaaaggcctggaatggctgggagtgatctggggcagcgagacaacctactacaacagcgccctgaagtcccggctgaccatcatcaaggacaactccaagagccaggtgttcctgaagatgaacagcctgcagaccgacgacaccgccatctactattgcgccaagcactactactacggcggcagctacgccatggattattggggccagggcaccagcgtgaccgtttcttctgccgccgctatcgaagtgatgtaccctcctccttacctggacaacgagaagtccaacggcaccatcatccacgtgaagggcaagcacctgtgtccttctccactgttccccggacctagcaagcctttctgggtgctcgttgttgttggcggcgtgctggcctgttacagcctgctggttaccgtggccttcatcatcttttgggtcagagtgaagttcagcagatccgccgatgctcccgcctatcagcagggccaaaaccagctgtacaacgagctgaacctggggagaagagaagagtacgacgtgctggacaagcggagaggcagagatcctgaaatgggcggcaagcccagacggaagaatcctcaagagggcctgtataatgagctgcagaaagacaagatggccgaggcctacagcgagatcggaatgaagggcgagcgcagaagaggcaagggacacgatggactgtaccagggactgagcaccgccaccaaggatacctatgacgccctgcacatgcaggccctgcctccaagataa

SEQ ID NO: 313 - DNA, 1461 bp, Artificial Sequence
  Description of Artificial Sequence: Synthetic polynucleotide
atggctctcccggtcacagcccttctcctgcccctggcactcttgctgcatgcggcacgacccgacatccagatgacccagaccacaagcagcctgtctgccagcctgggcgatagagtgaccatcagctgtagagccagccaggacatcagcaagtacctgaactggtatcagcaaaagcccgacggcaccgtgaagctgctgatctaccacaccagcagactgcacagcggcgtgccaagcagattttctggcagcggctctggcaccgactacagcctgacaatcagcaacctggaacaagaggatatcgctacctacttctgccagcaaggcaacaccctgccttacacctttggcggaggcaccaagctggaaatcaccggtggaggtggttctggcggagggggatctggtggaggcggttcagaagtgaaactgcaagagtctggccctggactggtggccccatctcagtctctgagcgtgacctgtacagtcagcggagtgtccctgcctgattacggcgtgtcctggatcagacagcctcctcggaaaggcctggaatggctgggagtgatctggggcagcgagacaacctactacaacagcgccctgaagtcccggctgaccatcatcaaggacaactccaagagccaggtgttcctgaagatgaacagcctgcagaccgacgacaccgccatctactattgcgccaagcactactactacggcggcagctacgccatggattattggggccagggcaccagcgtgaccgtttcttctaccacaacgcccgccccgcgaccgcctactcccgctcccacaattgcatcacaacccctgtctttgagacccgaagcttgtcgaccagctgccggtggcgcggttcacacgcgggggctcgatttcgcctgtgatatatatatatgggccccattggctggaacatgcggagtattgcttctgagcctggtgattaccctctactgtaagagaggccggaagaaacttctttatatattcaagcagccctttatgcgacccgttcagactacccaagaggaagatggatgcagttgccgctttccagaagaggaggagggcgggtgcgaactgagagtgaagttcagcagatccgccgatgctcccgcctatcagcagggccaaaaccagctgtacaacgagctgaacctggggagaagagaagagtacgacgtgctggacaagcggagaggcagagatcctgaaatgggcggcaagcccagacggaagaatcctcaagagggcctgtataatgagctgcagaaagacaagatggccgaggcctacagcgagatcggaatgaagggcgagcgcagaagaggcaagggacacgatggactgtaccagggactgagcaccgccaccaaggatacctatgacgccctgcacatgcaggccctgcctccaagataa

SEQ ID NO: 314 - DNA, 1461 bp, Artificial Sequence
  Description of Artificial Sequence: Synthetic polynucleotide
atggctctcccggtcacagcccttctcctgcccctggcactcttgctgcatgcggcacgacccgacatccagatgacccagaccacaagcagcctgtctgccagcctgggcgatagagtgaccatcagctgtagagccagccaggacatcagcaagtacctgaactggtatcagcaaaagcccgacggcaccgtgaagctgctgatctaccacaccagcagactgcacagcggcgtgccaagcagattttctggcagcggctctggcaccgactacagcctgacaatcagcaacctggaacaagaggatatcgctacctacttctgccagcaaggcaacaccctgccttacacctttggcggaggcaccaagctggaaatcaccggtggaggtggttctggcggagggggatctggtggaggcggttcagaagtgaaactgcaagagtctggccctggactggtggccccatctcagtctctgagcgtgacctgtacagtcagcggagtgtccctgcctgattacggcgtgtcctggatcagacagcctcctcggaaaggcctggaatggctgggagtgatctggggcagcgagacaacctactacaacagcgccctgaagtcccggctgaccatcatcaaggacaactccaagagccaggtgttcctgaagatgaacagcctgcagaccgacgacaccgccatctactattgcgccaagcactactactacggcggcagctacgccatggattattggggccagggcaccagcgtgaccgtttcttctaccacaacgcccgccccgcgaccgcctactcccgctcccacaattgcatcacaacccctgtctttgagacccgaagcttgtcgaccagctgccggtggcgcggttcacacgcgggggctcgatttcgcctgtgatatatatatatgggccccattggctggaacatgcggagtattgcttctgagcctggtgattaccctctactgtaagagaggccggaagaaacttctttatatattcaagcagccctttatgcgacccgttcagactacccaagaggaagatggatgcagttgccgctttccagaagaggaggagggcgggtgcgaactgagagtgaagttcagcagatccgccgatgctcccgcctataagcagggccaaaaccagctgtacaacgagctgaacctggggagaagagaagagtacgacgtgctggacaagcggagaggcagagatcctgaaatgggcggcaagcccagacggaagaatcctcaagagggcctgtataatgagctgcagaaagacaagatggccgaggcctacagcgagatcggaatgaagggcgagcgcagaagaggcaagggacacgatggactgtaccagggactgagcaccgccaccaaggatacctatgacgccctgcacatgcaggccctgcctccaagataa

SEQ ID NO: 315 - DNA, 1452 bp, Artificial Sequence
  Description of Artificial Sequence: Synthetic polynucleotide
atgctgctgctggtcacatctctgctgctgtgcgagctgccccatcctgcctttctgctgatcccccaggttcaactccagcagtctggtcccggcctcgttaaaccaagccagactttgtctcttacctgtgctatcagtggcgatagcgtgtctagtaattcagccgcatggaactggatccgacaatcaccgagtaggggacttgaatggctgggtagaacctattaccggtccaaatggtacaatgactatgcagtgtctgtaaaaagcaggatcacgatcaaccctgatacgtctaaaaaccagttttctctgcaacttaatagtgtgacccctgaagacaccgctgtgtattactgtgcacgggaggttaccggtgatcttgaagatgcttttgatatatggggccaaggtacgatggtcacggtgtctagtgggggaggcggcagcgacatacagatgacgcagagcccatccagtctctccgcgtctgttggtgacagagtgactattacatgtagggcgtctcagaccatttggtcttacctcaattggtatcaacagcgaccaggcaaagcaccgaacttgctcatttacgctgccagctcactccaaagtggtgtgccgtccagatttagtggtaggggcagtggcactgatttcactctgactatttcaagtcttcaagctgaggattttgccacatactactgccagcaaagttactcaatacctcagacttttggacaggggacaaaattggagattaaatccggaaccacaacgcccgccccgcgaccgcctactcccgctcccacaattgcatcacaacccctgtctttgagacccgaagcttgtcgaccagctgccggtggcgcggttcacacgcgggggctcgatttcgcctgtgatatatatatatgggccccattggctggaacatgcggagtattgcttctgagcctggtgattaccctctactgtaagagaggccggaagaaacttctttatatattcaagcagccctttatgcgacccgttcagactacccaagaggaagatggatgcagttgccgctttccagaagaggaggagggcgggtgcgaactgagagtgaagttcagcagatccgccgatgctcccgcctataagcagggccaaaaccagctgtacaacgagctgaacctggggagaagagaagagtacgacgtgctggacaagcggagaggcagagatcctgaaatgggcggcaagcccagacggaagaatcctcaagagggcctgtataatgagctgcagaaagacaagatggccgaggcctacagcgagatcggaatgaagggcgagcgcagaagaggcaagggacacgatggactgtaccagggactgagcaccgccaccaaggatacctatgacgccctgcacatgcaggccctgcctccaagataa

SEQ ID NO: 316 - DNA, 2202 bp, Artificial Sequence
  Description of Artificial Sequence: Synthetic polynucleotide
atgctgctgctggtcacatctctgctgctgtgcgagctgccccatcctgcctttctgctgatccccgacatccagatgacccagaccacaagcagcctgtctgccagcctgggcgatagagtgaccatcagctgtagagccagccaggacatcagcaagtacctgaactggtatcagcaaaagcccgacggcaccgtgaagctgctgatctaccacaccagcagactgcacagcggcgtgccaagcagattttctggcagcggctctggcaccgactacagcctgacaatcagcaacctggaacaagaggatatcgctacctacttctgccagcaaggcaacaccctgccttacacctttggcggaggcaccaagctggaaatcaccggcggcggaggatcccaggttcaactccagcagtctggtcccggcctcgttaaaccaagccagactttgtctcttacctgtgctatcagtggcgatagcgtgtctagtaattcagccgcatggaactggatccgacaatcaccgagtaggggacttgaatggctgggtagaacctattaccggtccaaatggtacaatgactatgcagtgtctgtaaaaagcaggatcacgatcaaccctgatacgtctaaaaaccagttttctctgcaacttaatagtgtgacccctgaagacaccgctgtgtattactgtgcacgggaggttaccggtgatcttgaagatgcttttgatatatggggccaaggtacgatggtcacggtgtctagtggctctacaagcggcagcggcaaacctggatctggcgagggatctaccaagggcgacatacagatgacgcagagcccatccagtctctccgcgtctgttggtgacagagtgactattacatgtagggcgtctcagaccatttggtcttacctcaattggtatcaacagcgaccaggcaaagcaccgaacttgctcatttacgctgccagctcactccaaagtggtgtgccgtccagatttagtggtaggggcagtggcactgatttcactctgactatttcaagtcttcaagctgaggattttgccacatactactgccagcaaagttactcaatacctcagacttttggacaggggacaaaattggagattaaagggggaggcggcagcgaagtgaaactgcaagagtctggccctggactggtggccccatctcagtctctgagcgtgacctgtacagtcagcggagtgtccctgcctgattacggcgtgtcctggatcagacagcctcctcggaaaggcctggaatggctgggagtgatctggggcagcgagacaacctactacaacagcgccctgaagtcccggctgaccatcatcaaggacaactccaagagccaggtgttcctgaagatgaacagcctgcagaccgacgacaccgccatctactattgcgccaagcactactactacggcggcagctacgccatggattattggggccagggcaccagcgtgaccgtttcttcttccggaaccacaacgcccgccccgcgaccgcctactcccgctcccacaattgcatcacaacccctgtctttgagacccgaagcttgtcgaccagctgccggtggcgcggttcacacgcgggggctcgatttcgcctgtgatatatatatatgggccccattggctggaacatgcggagtattgcttctgagcctggtgattaccctctactgtaagagaggccggaagaaacttctttatatattcaagcagccctttatgcgacccgttcagactacccaagaggaagatggatgcagttgccgctttccagaagaggaggagggcgggtgcgaactgagagtgaagttcagcagatccgccgatgctcccgcctataagcagggccaaaaccagctgtacaacgagctgaacctggggagaagagaagagtacgacgtgctggacaagcggagaggcagagatcctgaaatgggcggcaagcccagacggaagaatcctcaagagggcctgtataatgagctgcagaaagacaagatggccgaggcctacagcgagatcggaatgaagggcgagcgcagaagaggcaagggacacgatggactgtaccagggactgagcaccgccaccaaggatacctatgacgccctgcacatgcaggccctgcctccaagataa

SEQ ID NO: 317 - DNA, 2262 bp, Artificial Sequence
  Description of Artificial Sequence: Synthetic polynucleotide
atgctgctgctggtcacatctctgctgctgtgcgagctgccccatcctgcctttctgctgatcccccaggttcaactccagcagtctggtcccggcctcgttaaaccaagccagactttgtctcttacctgtgctatcagtggcgatagcgtgtctagtaattcagccgcatggaactggatccgacaatcaccgagtaggggacttgaatggctgggtagaacctattaccggtccaaatggtacaatgactatgcagtgtctgtaaaaagcaggatcacgatcaaccctgatacgtctaaaaaccagttttctctgcaacttaatagtgtgacccctgaagacaccgctgtgtattactgtgcacgggaggttaccggtgatcttgaagatgcttttgatatatggggccaaggtacgatggtcacggtgtctagtgggggaggcggcagcgacatacagatgacgcagagcccatccagtctctccgcgtctgttggtgacagagtgactattacatgtagggcgtctcagaccatttggtcttacctcaattggtatcaacagcgaccaggcaaagcaccgaacttgctcatttacgctgccagctcactccaaagtggtgtgccgtccagatttagtggtaggggcagtggcactgatttcactctgactatttcaagtcttcaagctgaggattttgccacatactactgccagcaaagttactcaatacctcagacttttggacaggggacaaaattggagattaaagggggaggcggatccggcggtggtggctccggcggtggtggttctggaggcggcggaagcggtgggggtggtagcgacatccagatgacccagaccacaagcagcctgtctgccagcctgggcgatagagtgaccatcagctgtagagccagccaggacatcagcaagtacctgaactggtatcagcaaaagcccgacggcaccgtgaagctgctgatctaccacaccagcagactgcacagcggcgtgccaagcagattttctggcagcggctctggcaccgactacagcctgacaatcagcaacctggaacaagaggatatcgctacctacttctgccagcaaggcaacaccctgccttacacctttggcggaggcaccaagctggaaatcaccggctctacaagcggcagcggcaaacctggatctggcgagggatctaccaagggcgaagtgaaactgcaagagtctggccctggactggtggccccatctcagtctctgagcgtgacctgtacagtcagcggagtgtccctgcctgattacggcgtgtcctggatcagacagcctcctcggaaaggcctggaatggctgggagtgatctggggcagcgagacaacctactacaacagcgccctgaagtcccggctgaccatcatcaaggacaactccaagagccaggtgttcctgaagatgaacagcctgcagaccgacgacaccgccatctactattgcgccaagcactactactacggcggcagctacgccatggattattggggccagggcaccagcgtgaccgtttcttcttccggaaccacaacgcccgccccgcgaccgcctactcccgctcccacaattgcatcacaacccctgtctttgagacccgaagcttgtcgaccagctgccggtggcgcggttcacacgcgggggctcgatttcgcctgtgatatatatatatgggccccattggctggaacatgcggagtattgcttctgagcctggtgattaccctctactgtaagagaggccggaagaaacttctttatatattcaagcagccctttatgcgacccgttcagactacccaagaggaagatggatgcagttgccgctttccagaagaggaggagggcgggtgcgaactgagagtgaagttcagcagatccgccgatgctcccgcctataagcagggccaaaaccagctgtacaacgagctgaacctggggagaagagaagagtacgacgtgctggacaagcggagaggcagagatcctgaaatgggcggcaagcccagacggaagaatcctcaagagggcctgtataatgagctgcagaaagacaagatggccgaggcctacagcgagatcggaatgaagggcgagcgcagaagaggcaagggacacgatggactgtaccagggactgagcaccgccaccaaggatacctatgacgccctgcacatgcaggccctgcctccaagataa

SEQ ID NO: 318 - protein, 42 aa, Artificial Sequence
  Description of Artificial Sequence: Synthetic polypeptide
KRGRKKLLYIFKQPFMRPVQTTQEEDGCSCRFPEEEEGGCEL

SEQ ID NO: 319 - protein, 112 aa, Artificial Sequence
  Description of Artificial Sequence: Synthetic polypeptide
RVKFSRSADAPAYKQGQNQLYNELNLGRREEYDVLDKRRGRDPEMGGKPRRKNPQEGLYNELQKDKMAEAYSEIGMKGERRRGKGHDGLYQGLSTATKDTYDALHMQALPPR

SEQ ID NO: 320 - protein, 241 aa, Artificial Sequence
  Description of Artificial Sequence: Synthetic polypeptide
QVQLVQSGAEVEKPGASVKVSCKASGYTFTDYYMHWVRQAPGQGLEWMGWINPNSGGTNYAQKFQGRVTMTRDTSISTAYMELSRLRSDDTAVYYCASGWDFDYWGQGTLVTVSSGGGGSGGGGSGGGGSGGGGSDIVMTQSPSSLSASVGDRVTITCRASQSIRYYLSWYQQKPGKAPKLLIYTASILQNGVPSRFSGSGSGTDFTLTISSLQPEDFATYYCLQTYTTPDFGPGTKVEIK

SEQ ID NO: 321 - protein, 120 aa, Artificial Sequence
  Description of Artificial Sequence: Synthetic polypeptide
EVKLQESGPGLVAPSQSLSVTCTVSGVSLPDYGVSWIRQPPRKGLEWLGVIWGSETTYYNSALKSRLTIIKDNSKSQVFLKMNSLQTDDTAIYYCAKHYYYGGSYAMDYWGQGTSVTVSS

SEQ ID NO: 322 - protein, 107 aa, Artificial Sequence
  Description of Artificial Sequence: Synthetic polypeptide
DIQMTQTTSSLSASLGDRVTISCRASQDISKYLNWYQQKPDGTVKLLIYHTSRLHSGVPSRFSGSGSGTDYSLTISNLEQEDIATYFCQQGNTLPYTFGGGTKLEIT

SEQ ID NO: 323 - protein, 447 aa, Artificial Sequence
  Description of Artificial Sequence: Synthetic polypeptide
QVQLVQSGVEVKKPGASVKVSCKASGYTFTNYYMYWVRQAPGQGLEWMGGINPSNGGTNFNEKFKNRVTLTTDSSTTTAYMELKSLQFDDTAVYYCARRDYRFDMGFDYWGQGTTVTVSSASTKGPSVFPLAPCSRSTSESTAALGCLVKDYFPEPVTVSWNSGALTSGVHTFPAVLQSSGLYSLSSVVTVPSSSLGTKTYTCNVDHKPSNTKVDKRVESKYGPPCPPCPAPEFLGGPSVFLFPPKPKDTLMISRTPEVTCVVVDVSQEDPEVQFNWYVDGVEVHNAKTKPREEQFNSTYRVVSVLTVLHQDWLNGKEYKCKVSNKGLPSSIEKTISKAKGQPREPQVYTLPPSQEEMTKNQVSLTCLVKGFYPSDIAVEWESNGQPENNYKTTPPVLDSDGSFFLYSRLTVDKSRWQEGNVFSCSVMHEALHNHYTQKSLSLSLGK

SEQ ID NO: 324 - protein, 218 aa, Artificial Sequence
  Description of Artificial Sequence: Synthetic polypeptide
EIVLTQSPATLSLSPGERATLSCRASKGVSTSGYSYLHWYQQKPGQAPRLLIYLASYLESGVPARFSGSGSGTDFTLTISSLEPEDFAVYYCQHSRDLPLTFGGGTKVEIKRTVAAPSVFIFPPSDEQLKSGTASVVCLLNNFYPREAKVQWKVDNALQSGNSQESVTEQDSKDSTYSLSSTLTLSKADYEKHKVYACEVTHQGLSSPVTKSFNRGEC

SEQ ID NO: 325 - protein, 440 aa, Artificial Sequence
  Description of Artificial Sequence: Synthetic polypeptide
QVQLVESGGGVVQPGRSLRLDCKASGITFSNSGMHWVRQAPGKGLEWVAVIWYDGSKRYYADSVKGRFTISRDNSKNTLFLQMNSLRAEDTAVYYCATNDDYWGQGTLVTVSSASTKGPSVFPLAPCSRSTSESTAALGCLVKDYFPEPVTVSWNSGALTSGVHTFPAVLQSSGLYSLSSVVTVPSSSLGTKTYTCNVDHKPSNTKVDKRVESKYGPPCPPCPAPEFLGGPSVFLFPPKPKDTLMISRTPEVTCVVVDVSQEDPEVQFNWYVDGVEVHNAKTKPREEQFNSTYRVVSVLTVLHQDWLNGKEYKCKVSNKGLPSSIEKTISKAKGQPREPQVYTLPPSQEEMTKNQVSLTCLVKGFYPSDIAVEWESNGQPENNYKTTPPVLDSDGSFFLYSRLTVDKSRWQEGNVFSCSVMHEALHNHYTQKSLSLSLGK

SEQ ID NO: 326 - protein, 214 aa, Artificial Sequence
  Description of Artificial Sequence: Synthetic polypeptide
EIVLTQSPATLSLSPGERATLSCRASQSVSSYLAWYQQKPGQAPRLLIYDASNRATGIPARFSGSGSGTDFTLTISSLEPEDFAVYYCQQSSNWPRTFGQGTKVEIKRTVAAPSVFIFPPSDEQLKSGTASVVCLLNNFYPREAKVQWKVDNALQSGNSQESVTEQDSKDSTYSLSSTLTLSKADYEKHKVYACEVTHQGLSSPVTKSFNRGEC

SEQ ID NO: 327 - protein, 448 aa, Artificial Sequence
  Description of Artificial Sequence: Synthetic polypeptide
EVQLVESGGGLVQPGGSLRLSCAASGFTFSDSWIHWVRQAPGKGLEWVAWISPYGGSTYYADSVKGRFTISADTSKNTAYLQMNSLRAEDTAVYYCARRHWPGGFDYWGQGTLVTVSSASTKGPSVFPLAPSSKSTSGGTAALGCLVKDYFPEPVTVSWNSGALTSGVHTFPAVLQSSGLYSLSSVVTVPSSSLGTQTYICNVNHKPSNTKVDKKVEPKSCDKTHTCPPCPAPELLGGPSVFLFPPKPKDTLMISRTPEVTCVVVDVSHEDPEVKFNWYVDGVEVHNAKTKPREEQYASTYRVVSVLTVLHQDWLNGKEYKCKVSNKALPAPIEKTISKAKGQPREPQVYTLPPSREEMTKNQVSLTCLVKGFYPSDIAVEWESNGQPENNYKTTPPVLDSDGSFFLYSKLTVDKSRWQQGNVFSCSVMHEALHNHYTQKSLSLSPGK

SEQ ID NO: 328 - protein, 214 aa, Artificial Sequence
  Description of Artificial Sequence: Synthetic polypeptide
DIQMTQSPSSLSASVGDRVTITCRASQDVSTAVAWYQQKPGKAPKLLIYSASFLYSGVPSRFSGSGSGTDFTLTISSLQPEDFATYYCQQYLYHPATFGQGTKVEIKRTVAAPSVFIFPPSDEQLKSGTASVVCLLNNFYPREAKVQWKVDNALQSGNSQESVTEQDSKDSTYSLSSTLTLSKADYEKHKVYACEVTHQGLSSPVTKSFNRGEC

SEQ ID NO: 329 - protein, 450 aa, Artificial Sequence
  Description of Artificial Sequence: Synthetic polypeptide
EVQLLESGGGLVQPGGSLRLSCAASGFTFSSYIMMWVRQAPGKGLEWVSSIYPSGGITFYADTVKGRFTISRDNSKNTLYLQMNSLRAEDTAVYYCARIKLGTVTTVDYWGQGTLVTVSSASTKGPSVFPLAPSSKSTSGGTAALGCLVKDYFPEPVTVSWNSGALTSGVHTFPAVLQSSGLYSLSSVVTVPSSSLGTQTYICNVNHKPSNTKVDKKVEPKSCDKTHTCPPCPAPELLGGPSVFLFPPKPKDTLMISRTPEVTCVVVDVSHEDPEVKFNWYVDGVEVHNAKTKPREEQYNSTYRVVSVLTVLHQDWLNGKEYKCKVSNKALPAPIEKTISKAKGQPREPQVYTLPPSRDELTKNQVSLTCLVKGFYPSDIAVEWESNGQPENNYKTTPPVLDSDGSFFLYSKLTVDKSRWQQGNVFSCSVMHEALHNHYTQKSLSLSPGK

SEQ ID NO: 330 - protein, 216 aa, Artificial Sequence
  Description of Artificial Sequence: Synthetic polypeptide
QSALTQPASVSGSPGQSITISCTGTSSDVGGYNYVSWYQQHPGKAPKLMIYDVSNRPSGVSNRFSGSKSGNTASLTISGLQAEDEADYYCSSYTSSSTRVFGTGTKVTVLGQPKANPTVTLFPPSSEELQANKATLVCLISDFYPGAVTVAWKADGSPVKAGVETTKPSKQSNNKYAASSYLSLTPEQWKSHRSYSCQVTHEGSTVEKTVAPTECS

SEQ ID NO: 331 - protein, 451 aa, Artificial Sequence
  Description of Artificial Sequence: Synthetic polypeptide
EVQLVESGGGLVQPGGSLRLSCAASGFTFSRYWMSWVRQAPGKGLEWVANIKQDGSEKYYVDSVKGRFTISRDNAKNSLYLQMNSLRAEDTAVYYCAREGGWFGELAFDYWGQGTLVTVSSASTKGPSVFPLAPSSKSTSGGTAALGCLVKDYFPEPVTVSWNSGALTSGVHTFPAVLQSSGLYSLSSVVTVPSSSLGTQTYICNVNHKPSNTKVDKRVEPKSCDKTHTCPPCPAPEFEGGPSVFLFPPKPKDTLMISRTPEVTCVVVDVSHEDPEVKFNWYVDGVEVHNAKTKPREEQYNSTYRVVSVLTVLHQDWLNGKEYKCKVSNKALPASIEKTISKAKGQPREPQVYTLPPSREEMTKNQVSLTCLVKGFYPSDIAVEWESNGQPENNYKTTPPVLDSDGSFFLYSKLTVDKSRWQQGNVFSCSVMHEALHNHYTQKSLSLSPGK

SEQ ID NO: 332 - protein, 215 aa, Artificial Sequence
  Description of Artificial Sequence: Synthetic polypeptide
EIVLTQSPGTLSLSPGERATLSCRASQRVSSSYLAWYQQKPGQAPRLLIYDASSRATGIPDRFSGSGSGTDFTLTISRLEPEDFAVYYCQQYGSLPWTFGQGTKVEIKRTVAAPSVFIFPPSDEQLKSGTASVVCLLNNFYPREAKVQWKVDNALQSGNSQESVTEQDSKDSTYSLSSTLTLSKADYEKHKVYACEVTHQGLSSPVTKSFNRGEC

SEQ ID NO: 333 - protein, 133 aa, Homo sapiens [sequence omitted]

SEQ ID NO: 334 - protein, 197 aa, Homo sapiens
RNLPVATPDPGMFPCLHHSQNLLRAVSNMLQKARQTLEFYPCTSEEIDHEDITKDKTSTVEACLPLELTKNESCLNSRETSFITNGSCLASRKTSFMMALCLSSIYEDLKMYQVEFKTMNAKLLMDPKRQIFLDQNMLAVIDELMQALNFNSETVPQKSSLEEPDFYKTKIKLCILLHAFRIRAVTIDRVMSYLNAS

SEQ ID NO: 335 - protein, 306 aa, Homo sapiens
IWELKKDVYVVELDWYPDAPGEMVVLTCDTPEEDGITWTLDQSSEVLGSGKTLTIQVKEFGDAGQYTCHKGGEVLSHSLLLLHKKEDGIWSTDILKDQKEPKNKTFLRCEAKNYSGRFTCWWLTTISTDLTFSVKSSRGSSDPQGVTCGAATLSAERVRGDNKEYEYSVECQEDSACPAAEESLPIEVMVDAVHKLKYENYTSSFFIRDIIKPDPPKNLQLKPLKNSRQVEVSWEYPDTWSTPHSYFSLTFCVQVQGKSKREKKDRVFTDKTSATVICRKNASISVRAQDRYYSSSWSEWASVPCS

SEQ ID NO: 336 - protein, 152 aa, Homo sapiens
DCDIEGKDGKQYESVLMVSIDQLLDSMKEIGSNCLNNEFNFFKRHICDANKEGMFLFRAARKLRQFLKMNSTGDFDLHLLKVSEGTTILLNCTGQVKGRKPAALGEAQPTKSLEENKSLKEQKKLNDLCFLKRLLQEIKTCWNKILMGTKEH

SEQ ID NO: 337 - protein, 160 aa, Homo sapiens
SPGQGTQSENSCTHFPGNLPNMLRDLRDAFSRVKTFFQMKDQLDNLLLKESLLEDFKGYLGCQALSEMIQFYLEEVMPQAENQDPDIKAHVNSLGENLKTLRLRLRRCHRFLPCENKSKAVEQVKNAFNKLQEKGIYKAMSEFDIFINYIEAYMTMKIRN

SEQ ID NO: 338 - protein, 114 aa, Homo sapiens
NWVNVISDLKKIEDLIQSMHIDATLYTESDVHPSCKVTAMKCFLLELQVISLESGDASIHDTVENLIILANNSLSSNGNVTESGCKECEELEEKNIKEFLQSFVHIVQMFINTS

SEQ ID NO: 339 - protein, 157 aa, Homo sapiens
YFGKLESKLSVIRNLNDQVLFIDQGNRPLFEDMTDSDCRDNAPRTIFIISMYKDSQPRGMAVTISVKCEKISTLSCENKIISFKEMNPPDNIKDTKSDIIFFQRSVPGHDNKMQFESSSYEGYFLACEKERDLFKLILKKEDELGDRSIMFTVQNED

SEQ ID NO: 340 - protein, 209 aa, Homo sapiens
RKGPPAALTLPRVQCRASRYPIAVDCSWTLPPAPNSTSPVSFIATYRLGMAARGHSWPCLQQTPTSTSCTITDVQLFSMAPYVLNVTAVHPWGSSSSFVPFITEHIIKPDPPEGVRLSPLAERQLQVQWEPPGSWPFPEIFSLKYWIRYKRQGAARFHRVGPIEATSFILRAVRPRARYYVQVAAQDLTDYGELSDWSLPATATMSLGK

SEQ ID NO: 341 - protein, 138 aa, Homo sapiens
QDPYVKEAENLKKYFNAGHSDVADNGTLFLGILKNWKEESDRKIMQSQIVSFYFKLFKNFKDDQSIQKSVETIKEDMNVKFFNSNKKKRDDFEKLTNYSVTDLNVQRKAIHELIQVMAELSPAAKTGKRKRSQMLFRG

SEQ ID NO: 342 - protein, 112 aa, Homo sapiens
ALDTNYCFSSTEKNCCVRQLYIDFRKDLGWKWIHEPKGYHANFCLGPCPYIWSLDTQYSKVLALYNQHNPGASAAPCCVPQALEPLPIVYYVGRKPKVEQLSNMIVRSCKCS

SEQ ID NO: 343 - protein, 431 aa, Homo sapiens
MPNPRPGKPSAPSLALGPSPGASPSWRAAPKASDLLGARGPGGTFQGRDLRGGAHASSSSLNPMPPSQLQLPTLPLVMVAPSGARLGPLPHLQALLQDRPHFMHQLSTVDAHARTPVLQVHPLESPAMISLTPPTTATGVFSLKARPGLPPGINVASLEWVSREPALLCTFPNPSAPRKDSTLSAVPQSSYPLLANGVCKWPGCEKVFEEPEDFLKHCQADHLLDEKGRAQCLLQREMVQSLEQQLVLEKEKLSAMQAHLAGKMALTKASSVASSDKGSCCIVAAGSQGPVVPAWSGPREAPDSLFAVRRHLWGSHGNSTFPEFLHNMDYFKFHNMRPPFTYATLIRWAILEAPEKQRTLNEIYHWFTRMFAFFRNHPATWKNAIRHNLSLHKCFVRVESEKGAVWTVDELEFRKKRSQRPSRCSNPTPGP

SEQ ID NO: 344 - protein, 417 aa, Homo sapiens
MPNPRPGKPSAPSLALGPSPGASPSWRAAPKASDLLGARGPGGTFQGRDLRGGAHASSSSLNPMPPSQLQLPTLPLVMVAPSGARLGPLPHLQALLQDRPHFMHQLSTVDAHARTPVLQVHPLESPAMISLTPPTTATGVFSLKARPGLPPGINVASLEWVSREPALLCTFPNPSAPRKDSTLSAVPQSSYPLLANGVCKWPGCEKVFEEPEDFLKHCQADHLLDEKGRAQCLLQREMVQSLEQQLVLEKEKLSAMQAHLAGKMALTKASSVASSDKGSCCIVAAGSQGPVVPAWSGPREAPDSLFAVRRHLWGSHGNSTFPEFLHNMDYFKFHNMRPPFTYATLIRWAILEAPEKQRTLNEIYHWFTRMFAFFRNHPATWKNAIRHNLSLHKCFVRVESEKGAVWTVDELEFRKKR

SEQ ID NO: 345 - protein, 366 aa, Homo sapiens
GGAHASSSSLNPMPPSQLQLPTLPLVMVAPSGARLGPLPHLQALLQDRPHFMHQLSTVDAHARTPVLQVHPLESPAMISLTPPTTATGVFSLKARPGLPPGINVASLEWVSREPALLCTFPNPSAPRKDSTLSAVPQSSYPLLANGVCKWPGCEKVFEEPEDFLKHCQADHLLDEKGRAQCLLQREMVQSLEQQLVLEKEKLSAMQAHLAGKMALTKASSVASSDKGSCCIVAAGSQGPVVPAWSGPREAPDSLFAVRRHLWGSHGNSTFPEFLHNMDYFKFHNMRPPFTYATLIRWAILEAPEKQRTLNEIYHWFTRMFAFFRNHPATWKNAIRHNLSLHKCFVRVESEKGAVWTVDELEFRKKR

SEQ ID NO: 346 - protein, 787 aa, Homo sapiens
MAVWIQAQQLQGEALHQMQALYGQHFPIEVRHYLSQWIESQAWDSVDLDNPQENIKATQLLEGLVQELQKKAEHQVGEDGFLLKIKLGHYATQLQNTYDRCPMELVRCIRHILYNEQRLVREANNGSSPAGSLADAMSQKHLQINQTFEELRLVTQDTENELKKLQQTQEYFIIQYQESLRIQAQFGPLAQLSPQERLSRETALQQKQVSLEAWLQREAQTLQQYRVELAEKHQKTLQLLRKQQTIILDDELIQWKRRQQLAGNGGPPEGSLDVLQSWCEKLAEIIWQNRQQIRRAEHLCQQLPIPGPVEEMLAEVNATITDIISALVTSTFIIEKQPPQVLKTQTKFAATVRLLVGGKLNVHMNPPQVKATIISEQQAKSLLKNENTRNDYSGEILNNCCVMEYHQATGTLSAHFRNMSLKRIKRSDRRGAESVTEEKFTILFESQFSVGGNELVFQVKTLSLPVVVIVHGSQDNNATATVLWDNAFAEPGRVPFAVPDKVLWPQLCEALNMKFKAEVQSNRGLTKENLVFLAQKLFNNSSSHLEDYSGLSVSWSQFNRENLPGRNYTFWQWFDGVMEVLKKHLKPHWNDGAILGFVNKQQAHDLLINKPDGTFLLRFSDSEIGGITIAWKFDSQERMFWNLMPFTTRDFSIRSLADRLGDLNYLIYVFPDRPKDEVYSKYYTPVPCESATAKAVDGYVKPQIKQVVPEFVNASADAGGGSATYMDQAPSPAVCPQAHYNMYPQNPDSVLDTDGDFDLEDTMDVARRVEELLGRPMDSQWIPHAQS

SEQ ID NO: 347 - protein, 526 aa, Homo sapiens [sequence omitted]

SEQ ID NO: 348 - DNA, 625 bp, Unknown
  Description of Unknown: AP1.0 sequence
attctcgggctacggccctggagccactccggctcctaaagatttagaagtttgagcacacccgcccactagggccccccatccaggggggcaacgggcaagcacttctgtttccccggtatgatctgataggctgtaaccacggctgaaacagagattatcgttatccgcttcactacttcgagaagcctagtaatgatgggtgaaattgaatccgttgatccggtgtctcccccacaccagaaactcatgatgagggttgccatcccggctacggcgacgtagcgggcatccctgcgctggcatgaggcctcttaggaggacggatgatatggatcttgtcgtgaagagcctattgagctagtgtcgactcctccgcccccgtgaatgcggctaatcctaaccccggagcaggtgggtccaatccagggcctggcctgtcgtaatgcgtaagtctgggacggaaccgactactttcgggaaggcgtgtttccatttgttcattatttgtgtgtttatggtgacaactctgggtaaacgttctattgcgtttattgagagattcccaacaattgaacaaacgagaactacctgttttattaaatttacacagagaagaattaca

SEQ ID NO: 349 - DNA, 549 bp, Unknown
  Description of Unknown: CK1.0 sequence
gtggccacgcccgggccaccgatacttcccttcactccttcgggactgttggggaggaacacaacagggctcccctgttttcccattccttcccccttttcccaaccccaaccgccgtatctggtggcggcaagacacacgggtctttccctctaaagcacaattgtgtgtgtgtcccaggtcctcctgcgtacggtgcgggagtgctcccacccaactgttgtaagcctgtccaacgcgtcgtcctggcaagactatgacgtcgcatgttccgctgcggatgccgaccgggtaaccggttccccagtgtgtgtagtgcgatcttccaggtcctcctggttggcgttgtccagaaactgcttcaggtaagtggggtgtgcccaatccctacaaaggttgattctttcaccaccttaggaatgctccggaggtaccccagcaacagctgggatctgaccggaggctaattgtctacgggtggtgtttcctttttcttttcacacaactctactgctgacaactcactgactatccacttgctctgtcacg

SEQ ID NO: 350 - DNA, 630 bp, Unknown
  Description of Unknown: PV1.0 sequence
aacaaaaggctacaccacttgggctacggcccgcgccaccttgtggcgcaaagacattagaagaatagcataccgcccactagggccctgcagccagcagggtaacgggcaagcacttctgtctccccggtagaacggtataggctgtacccacggccgaaaactgaactatcgttacccgactccgtacttcgcaaagcttagtaggaaactggaaagttcgagttattgacccggagtgttccccccactccagaaacgcgtgatgagggttgccaccccgaccatggcgacatggtgggcatccctgcgctggcacgcggcctctaagaggataactcgctcctactggtaaccgaagagccccgtgagctacggtttattcctccgcctccctgaatgcggctaatcctaacccatgagcagttgccatagatccatatggtggactgtcgtaacgcgtaagttgtgggcggaaccgactactttgggatggcgtgtttccttgttttctccatttgttgttgtatggtgacaagttatagatctcgatctatagcgtttcttgagagatttccaaacatttattcaagtcgtacaattcttgtgtttaagcagtacagtgtaacc

SEQ ID NO: 351 - DNA, 653 bp, Unknown
  Description of Unknown: SV1.0 sequence
tctgtcctcaccccatcttcccttctttcctgcaccgttacgcttactcgcatgtgcattgagtggtgcacgtgcttgaacaaacagctacactcacatgggggcgggttttcccgccctgcggcctctcgcgaggcccacccctccccttcctcccataactacagtgctttggtaggtaagcatcctgatcccccgcggaagctgctcacgtggcaactgtggggacccagacaggttatcaaaggcacccggtctttccgccttcaggagtatccctgctagtgaattctagtagggctctgcttggtgccaacctcccccaaatgcgcgctgcgggagtgctcttccccaactcaccctagtatcctctcatgtgtgtgcttggtcagcatatctgagacgatgttccgctgtcccagaccagtccagtaatggacgggccagtgtgcgtagtcgtcttccggcttgtccggcgcatgtttggtgaaccggtggggtaaggttggtgtgcccaacgcccgtactttggtgatacctcaagaccacccaggaatgccagggaggtaccccgcttcacagcgggatctgaccctgggctaattgtctacggtggttcttcttgcttccacttctttctactgttcgccacc

SEQ ID NO: 352 - DNA, 635 bp, Artificial Sequence
  Description of Artificial Sequence: Synthetic polynucleotide
gtggccacgcccgggccaccgatacttcccttcactccttcgggactgttggggaggaacacaacagggctcccctgttttcccattccttcccccttttcccaaccccaaccgccgtatctggtggcggcaagacacacgggtctttccctctaaagcacaattgtgtgtgtgtcccaggtcctcctgcgtacggtgcgggagtgctcccacccaactgttgtaagcctgtccaacgcgtcgtcctggcaagactatgacgtcgcatgttccgctgcggatgccgaccgggtaaccggttccccagtgtgtgtagtgcgatcttccaggtcctcctggttggcgttgtccagaaactgcttcaggtaagtggggtgtgcccaatccctacaaaggttgattctttcaccaccttaggaatgctccggaggtaccccagcaacagctgggatctgaccggaggctaattgtctacgggtggtgtttcctttttcttttcacacaactctactgctgacaactcactgactatccacttgctctcttgtgcctttctgctctggttcaagttccttgattgtttttgactgcttttcactgcttttcttctcacaatccttgctcagttcaaagtc

SEQ ID NO: 353 - DNA, 513 bp, Artificial Sequence
  Description of Artificial Sequence: Synthetic polynucleotide
gtggccacgcccgggccaccgatacttcccttcactccttcgggactgttggggaggaacacaacagggctcccctgttttcccattccttcccccttttcccaaccccaaccgccgtatctggtggcggcaagacacacgggtctttccctctaaagcacaattgtgtgtgtgtcccaggtcctcctgcgtacggtgcgggagtgctcccacccaactgttgtaagcctgtccaacgcgtcgtcctggcaagactatgacgtcgcatgttccgctgcggatgccgaccgggtaaccggttccccagtgtgtgtagtgcgatcttccaggtcctcctggttggcgttgtccagaaactgcttcaggtaagtggggtgtgcccaatccctacaaaggttgattctttcaccaccttaggaatgctccggaggtaccccagcaacagctgggatctgaccggaggctaattgtctacgggtggtgtttcctttttcttttcacacaactaaagtc

SEQ ID NO: 354 - DNA, 549 bp, Artificial Sequence
  Description of Artificial Sequence: Synthetic polynucleotide
gtggccacgcccgggccaccgatacttcccttcactccttcgggactgttggggaggaacacaacagggctcccctgttttcccattccttcccccttttcccaaccccaaccgccgtatctggtggcggcaagacacacgggtctttccctctaaagcacaattgtgtgtgtgtcccaggtcctcctgcgtacggtgcgggagtgctcccacccaactgttgtaagcctgtccaacgcgtcgtcctggcaagactatgacgtcgcatgttccgctgcggatgccgaccgggtaaccggttccccagtgtgtgtagtgcgatcttccaggtcctcctggttggcgttgtccagaaactgcttcaggtaagtggggtgtgcccaatccctacaaaggttgattctttcaccaccttaggaatgctccggaggtaccccagcaacagctgggatctgaccggaggctaattgtctacgggtggtgtttcctttttcttttcacacaactctactgctgacaactcactgactatccacttgctctaaagtc

SEQ ID NO: 355 - DNA, 513 bp, Artificial Sequence
  Description of Artificial Sequence: Synthetic polynucleotide
gtggccacgcccgggccaccgatacttcccttcactccttcgggactgttggggaggaacacaacagggctcccctgttttcccattccttcccccttttcccaaccccaaccgccgtatctggtggcggcaagacacacgggtctttccctctaaagcacaattgtgtgtgtgtcccaggtcctcctgcgtacggtgcgggagtgctcccacccaactgttgtaagcctgtccaacgcgtcgtcctggcaagactatgacgtcgcatgttccgctgcggatgccgaccgggtaaccggttccccagtgtgtgtagtgcgatcttccaggtcctcctggttggcgttgtccagaaactgcttcaggtaagtggggtgtgcccaatccctacaaaggttgattctttcaccaccttaggaatgctccggaggtaccccagcaacagctgggatctgaccggaggctaattgtctacgggtggtgtttcctttttcttttcacacaactgccacc

SEQ ID NO: 356 - DNA, 549 bp, Artificial Sequence
  Description of Artificial Sequence: Synthetic polynucleotide
gtggccacgcccgggccaccgatacttcccttcactccttcgggactgttggggaggaacacaacagggctcccctgttttcccattccttcccccttttcccaaccccaaccgccgtatctggtggcggcaagacacacgggtctttccctctaaagcacaattgtgtgtgtgtcccaggtcctcctgcgtacggtgcgggagtgctcccacccaactgttgtaagcctgtccaacgcgtcgtcctggcaagactatgacgtcgcatgttccgctgcggatgccgaccgggtaaccggttccccagtgtgtgtagtgcgatcttccaggtcctcctggttggcgttgtccagaaactgcttcaggtaagtggggtgtgcccaatccctacaaaggttgattctttcaccaccttaggaatgctccggaggtaccccagcaacagctgggatctgaccggaggctaattgtctacgggtggtgtttcctttttcttttcacacaactttcactgcttttcttctcacaatccttgctcagttcaaagtc

SEQ ID NO: 357 - DNA, 678 bp, Parabovirus sp.
tgaaccgttacgcaccactcagttggtgtttggtggcaccaatgatggaacaaaaggctacaccacttgggctacggcccgcgccaccttgtggcgcaaagacattagaagaatagcataccgcccactagggccctgcagccagcagggtaacgggcaagcacttctgtctccccggtagaacggtataggctgtacccacggccgaaaactgaactatcgttacccgactccgtacttcgcaaagcttagtaggaaactggaaagttcgagttattgacccggagtgttccccccactccagaaacgcgtgatgagggttgccaccccgaccatggcgacatggtgggcatccctgcgctggcacgcggcctctaagaggataactcgctcctactggtaaccgaagagccccgtgagctacggtttattcctccgcctccctgaatgcggctaatcctaacccatgagcagttgccatagatccatatggtggactgtcgtaacgcgtaagttgtgggcggaaccgactactttgggatggcgtgtttccttgttttctccatttgttgttgtatggtgacaagttatagatctcgatctatagcgtttcttgagagatttccaaacatttattcaagtcgtacaattcttgtgtttaagcagtacagtgtaagg

SEQ ID NO: 358 - DNA, 630 bp, Artificial Sequence
  Description of Artificial Sequence: Synthetic polynucleotide
aacaaaaggctacaccacttgggctacggcccgcgccaccttgtggcgcaaagacattagaagaatagcataccgcccactagggccctgcagccagcagggtaacgggcaagcacttctgtctccccggtagaacggtataggctgtacccacggccgaaaactgaactatcgttacccgactccgtacttcgcaaagcttagtaggaaactggaaagttcgagttattgacccggagtgttccccccactccagaaacgcgtgatgagggttgccaccccgaccatggcgacatggtgggcatccctgcgctggcacgcggcctctaagaggataactcgctcctactggtaaccgaagagccccgtgagctacggtttattcctccgcctccctgaatgcggctaatcctaacccatgagcagttgccatagatccatatggtggactgtcgtaacgcgtaagttgtgggcggaaccgactactttgggatggcgtgtttccttgttttctccatttgttgttgtatggtgacaagttatagatctcgatctatagcgtttcttgagagatttccaaacatttattcaagtcgtacaattcttgtgtttaagcagtacagtgtaagg

SEQ ID NO: 359 - DNA, 611 bp, Artificial Sequence
  Description of Artificial Sequence: Synthetic polynucleotide
tgggctacggcccgcgccaccttgtggcgcaaagacattagaagaatagcataccgcccactagggccctgcagccagcagggtaacgggcaagcacttctgtctccccggtagaacggtataggctgtacccacggccgaaaactgaactatcgttacccgactccgtacttcgcaaagcttagtaggaaactggaaagttcgagttattgacccggagtgttccccccactccagaaacgcgtgatgagggttgccaccccgaccatggcgacatggtgggcatccctgcgctggcacgcggcctctaagaggataactcgctcctactggtaaccgaagagccccgtgagctacggtttattcctccgcctccctgaatgcggctaatcctaacccatgagcagttgccatagatccatatggtggactgtcgtaacgcgtaagttgtgggcggaaccgactactttgggatggcgtgtttccttgttttctccatttgttgttgtatggtgacaagttatagatctcgatctatagcgtttcttgagagatttccaaacatttattcaagtcgtacaattcttgtgtttaagcagtacagtgtaagg

SEQ ID NO: 360 - DNA, 618 bp, Artificial Sequence
  Description of Artificial Sequence: Synthetic polynucleotide
tgaaccgttacgcaccactcagttggtgtttggtggcaccaatgatggaacaaaaggctacaccacttgggctacggcccgcgccaccttgtggcgcaaagacattagaagaatagcataccgcccactagggccctgcagccagcagggtaacgggcaagcacttctgtctccccggtagaacggtataggctgtacccacggccgaaaactgaactatcgttacccgactccgtacttcgcaaagcttagtaggaaactggaaagttcgagttattgacccggagtgttccccccactccagaaacgcgtgatgagggttgccaccccgaccatggcgacatggtgggcatccctgcgctggcacgcggcctctaagaggataactcgctcctactggtaaccgaagagccccgtgagctacggtttattcctccgcctccctgaatgcggctaatcctaacccatgagcagttgccatagatccatatggtggactgtcgtaacgcgtaagttgtgggcggaaccgactactttgggatggcgtgtttccttgttttctccatttgttgttgtatggtgacaagttatagatctcgatctatagcgtttgtaagg

SEQ ID NO: 361 - DNA, 826 bp, Unknown
  Description of Unknown: Apodemus Picornavirus sequence
tttgaaaggggtgcggatatcatggcgtttctcgccatgatatccgcacattgcaaacccatattgcatacccactgggtatgcattatggggaggcccctttcacccctccccccccaattaccttttccccctctagtaaccatacgctttactcagcgtaactactccgggttacgtgatgaagaagaggctacggagattctcgggctacggccctggagccactccggctcctaaagatttagaagtttgagcacacccgcccactagggccccccatccaggggggcaacgggcaagcacttctgtttccccggtatgatctgataggctgtaaccacggctgaaacagagattatcgttatccgcttcactacttcgagaagcctagtaatgatgggtgaaattgaatccgttgatccggtgtctcccccacaccagaaactcatgatgagggttgccatcccggctacggcgacgtagcgggcatccctgcgctggcatgaggcctcttaggaggacggatgatatggatcttgtcgtgaagagcctattgagctagtgtcgactcctccgcccccgtgaatgcggctaatcctaaccccggagcaggtgggtccaatccagggcctggcctgtcgtaatgcgtaagtctgggacggaaccgactactttcgggaaggcgtgtttccatttgttcattatttgtgtgtttatggtgacaactctgggtaaacgttctattgcgtttattgagagattcccaacaattgaacaaacgagaactacctgttttattaaatttacacagagaagaattaca

SEQ ID NO: 362 - DNA, 721 bp, Artificial Sequence
  Description of Artificial Sequence: Synthetic polynucleotide
cccctccccccccaattaccttttccccctctagtaaccatacgctttactcagcgtaactactccgggttacgtgatgaagaagaggctacggagattctcgggctacggccctggagccactccggctcctaaagatttagaagtttgagcacacccgcccactagggccccccatccaggggggcaacgggcaagcacttctgtttccccggtatgatctgataggctgtaaccacggctgaaacagagattatcgttatccgcttcactacttcgagaagcctagtaatgatgggtgaaattgaatccgttgatccggtgtctcccccacaccagaaactcatgatgagggttgccatcccggctacggcgacgtagcgggcatccctgcgctggcatgaggcctcttaggaggacggatgatatggatcttgtcgtgaagagcctattgagctagtgtcgactcctccgcccccgtgaatgcggctaatcctaaccccggagcaggtgggtccaatccagggcctggcctgtcgtaatgcgtaagtctgggacggaaccgactactttcgggaaggcgtgtttccatttgttcattatttgtgtgtttatggtgacaactctgggtaaacgttctattgcgtttattgagagattcccaacaattgaacaaacgagaactacctgttttattaaatttacacagagaagaattaca

SEQ ID NO: 363 - DNA, 625 bp, Artificial Sequence; identical to SEQ ID NO: 348
  Description of Artificial Sequence: Synthetic polynucleotide

SEQ ID NO: 364 - DNA, 766 bp, Kobuvirus sp.
tttcacaccctcttttccggtggtccggacccagaccaccgttactccattcagctacttcggtacctgttcggaggaattaaacgggcaccctacccaagggttacatgggaccatattcctcctcccctgtaactttaagttttgtgcccgtattcttgactccaggcggatgttgtgtcgcccgtcctgtgaacaaacagctagacactttcctcccctccctctgggctgctccggcagtccactccctccccccagcgtaacatgccccgctggagtgatgcacctggaagtcgtggacgtgggttagtaacttcggtgaaaacccactataatgacaactggttgacccccacactcaaaggactcgagtctttctcccttaaggctagcccggccacatgaatttgcagctggcaactagtgagtccaccatgtcccgcaacctcggctgcggagtgctgttccccaagcgtatgccttccttctgtaagagtgcgcctggcaagcacatctgagaagtcgttccgctgcgtcgtgccaacctggcgacaggtgacccagtgtgcgtagacttcttccggattcgtccggctcttctctaggaaacatgcgtgtaaggttcatgtgccaaagccctgcgcgcggtgttcttctactgccctaggaatgtgccgcaggtacccctacttcggtagggatctgagcggtagctaattgtctacgggtagtttcatttccatcttctcttcaggtcgacatc

SEQ ID NO: 365 - DNA, 608 bp, Artificial Sequence
  Description of Artificial Sequence: Synthetic polynucleotide
ttgactccaggcggatgttgtgtcgcccgtcctgtgaacaaacagctagacactttcctcccctccctctgggctgctccggcagtccactccctccccccagcgtaacatgccccgctggagtgatgcacctggaagtcgtggacgtgggttagtaacttcggtgaaaacccactataatgacaactggttgacccccacactcaaaggactcgagtctttctcccttaaggctagcccggccacatgaatttgcagctggcaactagtgagtccaccatgtcccgcaacctcggctgcggagtgctgttccccaagcgtatgccttccttctgtaagagtgcgcctggcaagcacatctgagaagtcgttccgctgcgtcgtgccaacctggcgacaggtgacccagtgtgcgtagacttcttccggattcgtccggctcttctctaggaaacatgcgtgtaaggttcatgtgccaaagccctgcgcgcggtgttcttctactgccctaggaatgtgccgcaggtacccctacttcggtagggatctgagcggtagctaattgtctacgggtagtttcatttccatcttctcttcaggtcgacatc

SEQ ID NO: 366 - DNA, 690 bp, Artificial Sequence
  Description of Artificial Sequence: Synthetic polynucleotide
gaattaaacgggcaccctacccaagggttacatgggaccatattcctcctcccctgtaactttaagttttgtgcccgtattcttgactccaggcggatgttgtgtcgcccgtcctgtgaacaaacagctagacactttcctcccctccctctgggctgctccggcagtccactccctccccccagcgtaacatgccccgctggagtgatgcacctggaagtcgtggacgtgggttagtaacttcggtgaaaacccactataatgacaactggttgacccccacactcaaaggactcgagtctttctcccttaaggctagcccggccacatgaatttgcagctggcaactagtgagtccaccatgtcccgcaacctcggctgcggagtgctgttccccaagcgtatgccttccttctgtaagagtgcgcctggcaagcacatctgagaagtcgttccgctgcgtcgtgccaacctggcgacaggtgacccagtgtgcgtagacttcttccggattcgtccggctcttctctaggaaacatgcgtgtaaggttcatgtgccaaagccctgcgcgcggtgttcttctactgccctaggaatgtgccgcaggtacccctacttcggtagggatctgagcggtagctaattgtctacgggtagtttcatttccatcttctcttcaggtcgacatc

SEQ ID NO: 367 - DNA, 729 bp, Artificial Sequence
  Description of Artificial Sequence: Synthetic polynucleotide
tttcacaccctcttttccggtggtccggacccagaccaccgttactccattcagctacttcggtacctgttcggaggaattaaacgggcaccctacccaagggttacatgggaccatattcctcctcccctgtaactttaagttttgtgcccgtattcttgactccaggcggatgttgtgtcgcccgtcctgtgaacaaacagctagacactttcctcccctccctctgggctgctccggcagtccactccctccccccagcgtaacatgccccgctggagtgatgcacctggaagtcgtggacgtgggttagtaacttcggtgaaaacccactataatgacaactggttgacccccacactcaaaggactcgagtctttctcccttaaggctagcccggccacatgaatttgcagctggcaactagtgagtccaccatgtcccgcaacctcggctgcggagtgctgttccccaagcgtatgccttccttctgtaagagtgcgcctggcaagcacatctgagaagtcgttccgctgcgtcgtgccaacctggcgacaggtgacccagtgtgcgtagacttcttccggattcgtccggctcttctctaggaaacatgcgtgtaaggttcatgtgccaaagccctgcgcgcggtgttcttctactgccctaggaatgtgccgcaggtacccctacttcggtagggatctgagcggtagctaattggacatc

SEQ ID NO: 368 - DNA, 650 bp, Salivirus sp.; identical to SEQ ID NO: 63

SEQ ID NO: 369 - DNA, 508 bp, Crohivirus B; identical to SEQ ID NO: 20

SEQ ID NO: 370 - DNA, 457 bp, Artificial Sequence
  Description of Artificial Sequence: Synthetic polynucleotide
ccccccttttccccagccatgggttaaatggcaataaaggacgtaacaactttgtaaccattaagctttgtaattttgtaaccactaagctttgtgcacataatgtaaccatcaagcttgttagtcccagcaggaggtttgcatgcttgtagccgaaatggggctcgaccccccatagtaggatacttgattttgcattccattgtggacctgcaaactctacacatagaggctttgtcttgcatctaaacacctgagtacagtgtgtacctagaccctatagtacgggaggaccgtttgtttcctcaataaccctacataataggctaggtgggcatgcccaatttgcaagatcccagactgggggtcggtctgggcagggttagatccctgttagctactgcctgatagggtggtgctcaaccatgtgtagtttaaattgagctgttcatatacc

SEQ ID NO: 371 - DNA, 742 bp, Unknown
  Description of Unknown: CVB3 sequence
ttaaaacagcctgtgggttgatcccacccacagggcccattgggcgctagcactctggtatcacggtacctttgtgcgcctgttttataccccctcccccaactgtaacttagaagtaacacacaccgatcaacagtcagcgtggcacaccagccacgttttgatcaagcacttctgttaccccggactgagtatcaatagactgctcacgcggttgaaggagaaagcgttcgttatccggccaactacttcgaaaaacctagtaacaccgtggaagttgcagagtgtttcgctcagcactaccccagtgtagatcaggtcgatgagtcaccgcattccccacgggcgaccgtggcggtggctgcgttggcggcctgcccatggggaaacccatgggacgctctaatacagacatggtgcgaagagtctattgagctagttggtagtcctccggcccctgaatgcggctaatcctaactgcggagcacacaccctcaagccagagggcagtgtgtcgtaacgggcaactctgcagcggaaccgactactttgggtgtccgtgtttcattttattcctatactggctgcttatggtgacaattgagagattgttaccatatagctattggattggccatccggtgaccaatagagctattatatatctctttgttgggtttataccacttagcttgaaagaggttaaaacattacaattcattgttaagttgaatacagcaaa

SEQ ID NO: 372 - DNA, 651 bp, Artificial Sequence
  Description of Artificial Sequence: Synthetic polynucleotide
ttaaaacagcctgtgggttgatcccacccacagggcccattgggcgctagcactctggtatcacggtacctttgtgcgcctgttttataccccctcccccaactgtaacttagaagtaacacacaccgatcaacagtcagcgtggcacaccagccacgttttgatcaagcacttctgttaccccggactgagtatcaatagactgctcacgcggttgaaggagaaagcgttcgttatccggccaactacttcgaaaaacctagtaacaccgtggaagttgcagagtgtttcgctcagcactaccccagtgtagatcaggtcgatgagtcaccgcattccccacgggcgaccgtggcggtggctgcgttggcggcctgcccatggggaaacccatgggacgctctaatacagacatggtgcgaagagtctattgagctagttggtagtcctccggcccctgaatgcggctaatcctaactgcggagcacacaccctcaagccagagggcagtgtgtcgtaacgggcaactctgcagcggaaccgactactttgggtgtccgtgtttcattttattcctatactggctgcttatggtgacaattgagagattgttaccatatagctattggattggccatccggtgaagcaaa

SEQ ID NO: 373 - DNA, 721 bp, Unknown
  Description of Unknown: SAFV sequence
cacttatttaattcggccttttgtgacaagcccctcggtgaaagaacctctctcttttcgacgtggttggaattgccatcatttccgacgaaagtgctatcatgcctccccgattatgtgatgttttctgccctgctgggcggagcattctcgggttgagaaaccttgaatctttttctttggaaccttggttcccccggtctaagccgcttggaatatgacagggttattttcttgatcttatttctacttttgcgggttctatccgtaaaaagggtacgtgctgccccttccttctctggagaattcacacggcggtctttccgtctctcaacaagtgtgaatgcagcatgccggaaacggtgaagaaaacagttttctgtggaaatttagagtgcacatcgaaacagctgtagcgacctcacagtagcagcggactcccctcttggcgacaagagcctctgcggccaaaagccccgtggataagatccactgctgtgagcggtgcaaccccagcaccctggttcgatgatcattctctatggaaccagaaaatggttttctcaagccctccggtagagaagccaagaatgtcctgaaggtaccccgcgtgcgggatctgatcaggagaccaattggcggtgctttacactgtcactttggtttaaaaattgtcacagcttctccaaaccaagtggtcttggttttccaattttgttga

SEQ ID NO: 374 - DNA, 675 bp, Artificial Sequence
  Description of Artificial Sequence: Synthetic polynucleotide
cctctctcttttcgacgtggttggaattgccatcatttccgacgaaagtgctatcatgcctccccgattatgtgatgttttctgccctgctgggcggagcattctcgggttgagaaaccttgaatctttttctttggaaccttggttcccccggtctaagccgcttggaatatgacagggttattttcttgatcttatttctacttttgcgggttctatccgtaaaaagggtacgtgctgccccttccttctctggagaattcacacggcggtctttccgtctctcaacaagtgtgaatgcagcatgccggaaacggtgaagaaaacagttttctgtggaaatttagagtgcacatcgaaacagctgtagcgacctcacagtagcagcggactcccctcttggcgacaagagcctctgcggccaaaagccccgtggataagatccactgctgtgagcggtgcaaccccagcaccctggttcgatgatcattctctatggaaccagaaaatggttttctcaagccctccggtagagaagccaagaatgtcctgaaggtaccccgcgtgcgggatctgatcaggagaccaattggcggtgctttacactgtcactttggtttaaaaattgtcacagcttctccaaaccaagtggtcttggttttccaattttgttga

SEQ ID NO: 375 - DNA, 628 bp, Artificial Sequence
  Description of Artificial Sequence: Synthetic polynucleotide
gtgctatcatgcctccccgattatgtgatgttttctgccctgctgggcggagcattctcgggttgagaaaccttgaatctttttctttggaaccttggttcccccggtctaagccgcttggaatatgacagggttattttcttgatcttatttctacttttgcgggttctatccgtaaaaagggtacgtgctgccccttccttctctggagaattcacacggcggtctttccgtctctcaacaagtgtgaatgcagcatgccggaaacggtgaagaaaacagttttctgtggaaatttagagtgcacatcgaaacagctgtagcgacctcacagtagcagcggactcccctcttggcgacaagagcctctgcggccaaaagccccgtggataagatccactgctgtgagcggtgcaaccccagcaccctggttcgatgatcattctctatggaaccagaaaatggttttctcaagccctccggtagagaagccaagaatgtcctgaaggtaccccgcgtgcgggatctgatcaggagaccaattggcggtgctttacactgtcactttggtttaaaaattgtcacagcttctccaaaccaagtggtcttggttttccaattttgttga

SEQ ID NO: 376 - DNA, 674 bp, Artificial Sequence
  Description of Artificial Sequence: Synthetic polynucleotide
cacttatttaattcggccttttgtgacaagcccctcggtgaaagaacctctctcttttcgacgtggttggaattgccatcatttccgacgaaagtgctatcatgcctccccgattatgtgatgttttctgccctgctgggcggagcattctcgggttgagaaaccttgaatctttttctttggaaccttggttcccccggtctaagccgcttggaatatgacagggttattttcttgatcttatttctacttttgcgggttctatccgtaaaaagggtacgtgctgccccttccttctctggagaattcacacggcggtctttccgtctctcaacaagtgtgaatgcagcatgccggaaacggtgaagaaaacagttttctgtggaaatttagagtgcacatcgaaacagctgtagcgacctcacagtagcagcggactcccctcttggcgacaagagcctctgcggccaaaagccccgtggataagatccactgctgtgagcggtgcaaccccagcaccctggttcgatgatcattctctatggaaccagaaaatggttttctcaagccctccggtagagaagccaagaatgtcctgaaggtaccccgcgtgcgggatctgatcaggagaccaattggcggtgctttacactgtcactttggtttaatgttga

SEQ ID NO: 377 - DNA, 726 bp, Artificial Sequence
  Description of Artificial Sequence: Synthetic polynucleotide
cacttatttaattcggccttttgtgacaagcccctcggtgaaagaacctctctcttttcgacgtggttggaattgccatcatttccgacgaaagtgctatcatgcctccccgattatgtgatgttttctgccctgctgggcggagcattctcgggttgagaaaccttgaatctttttctttggaaccttggttcccccggtctaagccgcttggaatatgacagggttattttcttgatcttatttctacttttgcgggttctatccgtaaaaagggtacgtgctgccccttccttctctggagaattcacacggcggtctttccgtctctcaacaagtgtgaatgcagcatgccggaaacggtgaagaaaacagttttctgtggaaatttagagtgcacatcgaaacagctgtagcgacctcacagtagcagcggactcccctcttggcgacaagagcctctgcggccaaaagccccgtggataagatccactgctgtgagcggtgcaaccccagcaccctggttcgatgatcattctctatggaaccagaaaatggttttctcaagccctccggtagagaagccaagaatgtcctgaaggtaccccgcgtgcgggatctgatcaggagaccaattggcggtgctttacactgtcactttggtttaaaaattgtcacagcttctccaaaccaagtggtcttggttttccaattttgttgaccgcc

SEQ ID NO: 378 - DNA, 549 bp, Unknown
  Description of Unknown: GLuc CK dCTG1 sequence
gtggccacgcccgggccaccgatacttcccttcactccttcgggactgttggggaggaacacaacagggctcccctgttttcccattccttcccccttttcccaaccccaaccgccgtatctggtggcggcaagacacacgggtctttccctctaaagcacaattgtgtgtgtgtcccaggtcctcctgcgtacggtgcgggagtgctcccacccaactgttgtaagcctgtccaacgcgtcgtcctggcaagactatgacgtcgcatgttccgctgcggatgccgaccgggtaaccggttccccagtgtgtgtagtgcgatcttccaggtcctcctggttggcgttgtccagaaactgcttcaggtaagtggggtgtgcccaatccctacaaaggttgattctttcaccaccttaggaatgctccggaggtaccccagcaacagctgggatctgaccggaggctaattgtctacgggtggtgtttcctttttcttttcacacaactctacgtctgacaactcactgactatccacttgctctaaagtc

SEQ ID NO: 379 - DNA, 549 bp, Unknown
  Description of Unknown: GLuc CK dCTG1_2 sequence
gtggccacgcccgggccaccgatacttcccttcactccttcgggactgttggggaggaacacaacagggctcccctgttttcccattccttcccccttttcccaaccccaaccgccgtatctggtggcggcaagacacacgggtctttccctctaaagcacaattgtgtgtgtgtcccaggtcctcctgcgtacggtgcgggagtgctcccacccaactgttgtaagcctgtccaacgcgtcgtcctggcaagactatgacgtcgcatgttccgctgcggatgccgaccgggtaaccggttccccagtgtgtgtagtgcgatcttccaggtcctcctggttggcgttgtccagaaactgcttcaggtaagtggggtgtgcccaatccctacaaaggttgattctttcaccaccttaggaatgctccggaggtaccccagcaacagctgggatctgaccggaggctaattgtctacgggtggtgtttcctttttcttttcacacaactctacgtcgtacaactcactgactatccacttgctctaaagtc

SEQ ID NO: 380 - DNA, 549 bp, Unknown
  Description of Unknown: GLuc CK dCTG1_2_3 sequence
gtggccacgcccgggccaccgatacttcccttcactccttcgggactgttggggaggaacacaacagggctcccctgttttcccattccttcccccttttcccaaccccaaccgccgtatctggtggcggcaagacacacgggtctttccctctaaagcacaattgtgtgtgtgtcccaggtcctcctgcgtacggtgcgggagtgctcccacccaactgttgtaagcctgtccaacgcgtcgtcctggcaagactatgacgtcgcatgttccgctgcggatgccgaccgggtaaccggttccccagtgtgtgtagtgcgatcttccaggtcctcctggttggcgttgtccagaaactgcttcaggtaagtggggtgtgcccaatccctacaaaggttgattctttcaccaccttaggaatgctccggaggtaccccagcaacagctgggatctgaccggaggctaattgtctacgggtggtgtttcctttttcttttcacacaactctacgtcgtacaactcacgtactatccacttgctctaaagtc

SEQ ID NO: 381 - DNA, 549 bp, Unknown
  Description of Unknown: GLuc CK dAll sequence
gtggccacgcccgggccaccgatacttcccttcactccttcgggactgttggggaggaacacaacagggctcccctgttttcccattccttcccccttttcccaaccccaaccgccgtatctggtggcggcaagacacacgggtctttccctctaaagcacaattgtgtgtgtgtcccaggtcctcctgcgtacggtgcgggagtgctcccacccaactgttgtaagcctgtccaacgcgtcgtcctggcaagactatgacgtcgcatgttccgctgcggatgccgaccgggtaaccggttccccagtgtgtgtagtgcgatcttccaggtcctcctggttggcgttgtccagaaactgcttcaggtaagtggggtgtgcccaatccctacaaaggttgattctttcaccaccttaggaatgctccggaggtaccccagcaacagctgggatctgaccggaggctaattgtctacgggtggtgtttcctttttcttttcacacaactctacgtcgtacaactcacgtactactcactgtctctaaagtc

SEQ ID NO: 382 - DNA, 549 bp, Unknown
  Description of Unknown: CK SZ1-L1S sequence
gggggtggggggggcctcggccccctcaccctcttttccggtggccacgcccgggccaccgatacttcccttcactccttcgggactgttggggaggaacacaacagggctcccctgttttcccattccttcccccttttcccaaccccaaccgccgtatctggtggcggcaagacacacgggtctttccctctaaagcacaattgtgtgtgtgtcccaggtcctcctgcgtacggtgcgggagtgctcccacccaactgttgtaagcctgtccaacgcgtcgtcctggcaagactatgacgtcgcatgttccgctgcggatgccgaccgggtaaccggttccccagtgtgtgtagtgcgatcttccaggtcctcctggttggcgttgtccagaaactgcttcaggtaagtggggtgtgcccaatccctacaaaggttgaaccacccaggaatgccagggaggtaccccgcttcacagcgggatctgaccctgggctaattgtctacggtggttcttcttgcttccacttctttctactgttcgccacc

SEQ ID NO: 383 - DNA, 553 bp, Unknown
  Description of Unknown: CK Aichi Scan (AV-S) sequence
gggggtggggggggcctcggccccctcaccctcttttccggtggccacgcccgggccaccgatacttcccttcactccttcgggactgttggggaggaacacaacagggctcccctgttttcccattccttcccccttttcccaaccccaaccgccgtatctggtggcggcaagacacacgggtctttccctctaaagcacaattgtgtgtgtgtcccaggtcctcctgcgtacggtgcgggagtgctcccacccaactgttgtaagcctgtccaacgcgtcgtcctggcaagactatgacgtcgcatgttccgctgcggatgccgaccgggtaaccggttccccagtgtgtgtagtgcgatcttccaggtcctcctggttggcgttgtccagaaactgcttcaggtaagtggggtgtgcccaatccctacaaaggttgattctttcaccaccttaggaatgctccggaggtaccccagcaacagctgggatctgaccggaggctaattgtctacgggtggtgtttcatttccaatccttttatgtcggagtc

SEQ ID NO: 384 - DNA, 667 bp, Unknown
  Description of Unknown: CK Aichi Loop (AV-L1) sequence
gggggtggggggggcctcggccccctcaccctcttttccggtggccacgcccgggccaccgatacttcccttcactccttcgggactgttggggaggaacacaacagggctcccctgttttcccattccttcccccttttcccaaccccaaccgccgtatctggtggcggcaagacacacgggtctttccctctaaagcacaattgtgtgtgtgtcccaggtcctcctgcgtacggtgcgggagtgctcccacccaactgttgtaagcctgtccaacgcgtcgtcctggcaagactatgacgtcgcatgttccgctgcggatgccgaccgggtaaccggttccccagtgtgtgtagtgcgatcttccaggtcctcctggttggcgttgtccagaaactgcttcaggtaagtggggtgtgcccaatccctacaaaggttgaactgccctaggaatgccaggcaggtaccccacctccgggtgggatctgagcctgggctaattgtctacgggtagttttcctttttcttttcacacaactctactgctgacaactcactgactatccacttgctctcttgtgcctttctgctctggttcaagttccttgattgtttttgactgcttttcactgcttttcttctcacaatccttgctcagttcaaagtc

SEQ ID NO: 385 - DNA, 693 bp, Unknown
  Description of Unknown: CK SZ1-L2 sequence
gggggtggggggggcctcggccccctcaccctcttttccggtggccacgcccgggccaccgatacttcccttcactccttcgggactgttggggaggaacacaacagggctcccctgttttcccattccttcccccttttcccaaccccaaccgccgtatctggtggcggcaagacacacgggtctttccctctaaagcacaattgtgtgtgtgtcccaggtcctcctgcgtacggtgcgggagtgctcccacccaactgttgtaagcctgtccaacgcctgatcccccgcggaagctgctcacgtggcaactgtggggacccagacaggttatcaaaggcacccggtctttccgccttcaggagtatccctgctagtgaattctagtagggctctgcttgcgttgtccagaaactgcttcaggtaagtggggtgtgcccaatccctacaaaggttgattctttcaccaccttaggaatgctccggaggtaccccagcaacagctgggatctgaccggaggctaattgtctacgggtggtgtttcctttttcttttcacacaactctactgctgacaactcactgactatccacttgctctcttgtgcctttctgctctggttcaagttccttgattgtttttgactgcttttcactgcttttcttctcacaatccttgctcagttcaaagtc

SEQ ID NO: 386 - DNA, 671 bp, Unknown
  Description of Unknown: CK Aichi TriLoop (AV-L2) sequence
gggggtggggggggcctcggccccctcaccctcttttccggtggccacgcccgggccaccgatacttcccttcactccttcgggactgttggggaggaacacaacagggctcccctgttttcccattccttcccccttttcccaaccccaaccgccgtatctggtggcggcaagacacacgggtctttccctctaaagcacaattgtgtgtgtgtcccaggtcctcctgcgtacggtgcgggagtgctcccacccaactgttgtaagcctgtccaacgcatgtgcctggcaagcatatctgagaaggtgttccgctgtggctgccaacctggtgacaggtgccccagtgtgcgtaaccttcttccgtctccggacggtgcgttgtccagaaactgcttcaggtaagtggggtgtgcccaatccctacaaaggttgattctttcaccaccttaggaatgctccggaggtaccccagcaacagctgggatctgaccggaggctaattgtctacgggtggtgtttcctttttcttttcacacaactctactgctgacaactcactgactatccacttgctctcttgtgcctttctgctctggttcaagttccttgattgtttttgactgcttttcactgcttttcttctcacaatccttgctcagttcaaagtc

SEQ ID NO: 387 - DNA, 523 bp, Artificial Sequence
  Description of Artificial Sequence: Synthetic polynucleotide
gggggtggggggggcctcggccccctcaccctcttttccggtggccacgcccgggccaccgatacttcccttcactccttcgggactgttggggaggaacacaacagggctcccctgttttcccattccttcccccttttcccaaccccaaccgccgtatctggtggcggcaagacacacgggtctttccctctaaagcacaattgtgtgtgtgtcccaggtcctcctgcgtacggtgcgggagtgctcccacccaactgttgtaagcctgtccaacgcgtcgtcctggcaagactatgacgtcgcatgttccgctgcggatgccgaccgggtaaccggttccccagtgtgtgtagtgcgatcttccaggtcctcctggttggcgttgtccagaaactgcttcaggtaagtggggtgtgcccaatccctacaaaggttgattctttcaccaccttaggaatgctccggaggtaccccagcaacagctgggatctgaccggaggctaattgtctacgggtggtg

SEQ ID NO: 388 - DNA, 592 bp, Artificial Sequence
  Description of Artificial Sequence: Synthetic polynucleotide
gggggtggggggggcctcggccccctcaccctcttttccggtggccacgcccgggccaccgatacttcccttcactccttcgggactgttggggaggaacacaacagggctcccctgttttcccattccttcccccttttcccaaccccaaccgccgtatctggtggcggcaagacacacgggtctttccctctaaagcacaattgtgtgtgtgtcccaggtcctcctgcgtacggtgcgggagtgctcccacccaactgttgtaagcctgtccaacgcgtcgtcctggcaagactatgacgtcgcatgttccgctgcggatgccgaccgggtaaccggttccccagtgtgtgtagtgcgatcttccaggtcctcctggttggcgttgtccagaaactgcttcaggtaagtggggtgtgcccaatccctacaaaggttgatttcctttttcttttcacacaactctactgctgacaactcactgactatccacttgctctcttgtgcctttctgctctggttcaagttccttgattgtttttgactgcttttcactgcttttcttctcacaatccttgctcagttcaaagtc

SEQ ID NO: 389 - DNA, 572 bp, Artificial Sequence
  Description of Artificial Sequence: Synthetic polynucleotide
gggggtggggggggcctcggccccctcaccctcttttccggtggccacgcccgggccaccgatacttcccttcactccttcgggactgttggggaggaacacaacagggctcccctgttttcccattccttcccccttttcccaaccccaaccgccgtatctggtggcggcaagacacacgggtctttccctctaaagcacaattgtgtgtgtgtcccaggtcctcctgcgtacggtgcgggagtgctcccacccaactgttgtaagcctgtccaacgcgcgttgtccagaaactgcttcaggtaagtggggtgtgcccaatccctacaaaggttgattctttcaccaccttaggaatgctccggaggtaccccagcaacagctgggatctgaccggaggctaattgtctacgggtggtgtttcctttttcttttcacacaactctactgctgacaactcactgactatccacttgctctcttgtgcctttctgctctggttcaagttccttgattgtttttgactgcttttcactgcttttcttctcacaatccttgctcagttcaaagtc

SEQ ID NO: 390 - DNA, 167 bp, Artificial Sequence
  Description of Artificial Sequence: Synthetic polynucleotide
ccctgcagccgtcaccgtaagtttgaagttaccgcatatcagcctctgcttcccagcgcgtccaattcctgttcttattgtttcccctccaggcgttacgcgtgacgacgaactgtgtcgcagctaccacattattccggagccttcattctcgcggctctgatcgt

SEQ ID NO: 391 - DNA, 43 bp, Artificial Sequence
  Description of Artificial Sequence: Synthetic oligonucleotide
ggagaccgcggccacgccgagtaggatcgagggtacagtctcc

SEQ ID NO: 392 - DNA, 167 bp, Artificial Sequence
  Description of Artificial Sequence: Synthetic polynucleotide
gacaccaggatcactcttgctctgacccgccctgtgtagaatagactcatgcttccctaagacctggatttcttcccaggcactttcacccgcctgccctgctccttcagtggactgcacccagggaggcggtctctgactgtcctttactttctattctggattgc

SEQ ID NO: 393 - DNA, 30 bp, Artificial Sequence
  Description of Artificial Sequence: Synthetic oligonucleotide
aaacccccctaagccgccgccgccgccacc

SEQ ID NO: 394 - DNA, 18 bp, Artificial Sequence
  Description of Artificial Sequence: Synthetic oligonucleotide
cccccccaacccgtcacg

SEQ ID NO: 395 - DNA, 6 bp, Artificial Sequence
  Description of Artificial Sequence: Synthetic oligonucleotide
gtcacg

SEQ ID NO: 396 - DNA, 141 bp, Artificial Sequence
  Description of Artificial Sequence: Synthetic polynucleotide
tctgcgcactcgtaatcagtactaacccccctttgtcggacactatgcgataatcgatccgcctttttcaccgccttcggaattttatttacctcaactgatcctggagtctctcttggttttcacggaggcctccgccca

SEQ ID NO: 397 - DNA, 43 bp, Artificial Sequence; identical to SEQ ID NO: 391
  Description of Artificial Sequence: Synthetic oligonucleotide

SEQ ID NO: 398 - DNA, 141 bp, Artificial Sequence
  Description of Artificial Sequence: Synthetic polynucleotide
ccccttgaaacccccgccccaggttcagtctctcttcatccctctgtcctgcatggtgatacaaagaccctttgtggaccctaagccatgtagttgctgctccctccttccagttgtgaatattggtttctgttaatcaca

SEQ ID NO: 399 - DNA, 30 bp, Artificial Sequence; identical to SEQ ID NO: 393
  Description of Artificial Sequence: Synthetic oligonucleotide

SEQ ID NO: 400 - DNA, 18 bp, Artificial Sequence
  Description of Artificial Sequence: Synthetic oligonucleotide
cccccccaacccgtcacg

SEQ ID NO: 401 - DNA, 6 bp, Artificial Sequence
  Description of Artificial Sequence: Synthetic oligonucleotide
gtcacg

SEQ ID NO: 402 - DNA, 6 bp, Artificial Sequence
  Description of Artificial Sequence: Synthetic oligonucleotide
gtcacg

SEQ ID NO: 403 - DNA, 43 bp, Artificial Sequence
  Description of Artificial Sequence: Synthetic oligonucleotide
aataagagagaaaagaagagtaagaagaaatataagagccacc

SEQ ID NO: 404 - DNA, 49 bp, Artificial Sequence
  Description of Artificial Sequence: Synthetic oligonucleotide
cgaactagtattcttctggtccccacagactcagagagaacccgccacc

SEQ ID NO: 405 - DNA, 7 bp, Artificial Sequence
  Description of Artificial Sequence: Synthetic oligonucleotide
agccacc

SEQ ID NO: 406 - DNA, 14 bp, Artificial Sequence
  Description of Artificial Sequence: Synthetic oligonucleotide
tgatagctaactag

SEQ ID NO: 407 - DNA, 14 bp, Artificial Sequence
  Description of Artificial Sequence: Synthetic oligonucleotide
tagtagctaactag

SEQ ID NO: 408 - DNA, 14 bp, Artificial Sequence
  Description of Artificial Sequence: Synthetic oligonucleotide
tgatgactgagtga

SEQ ID NO: 409 - DNA, 14 bp, Artificial Sequence
  Description of Artificial Sequence: Synthetic oligonucleotide
tagtagctaggtag

SEQ ID NO: 410 - DNA, 3 bp, Artificial Sequence
  Description of Artificial Sequence: Synthetic oligonucleotide
taa

SEQ ID NO: 411 - DNA, 14 bp, Artificial Sequence
  Description of Artificial Sequence: Synthetic oligonucleotide
taatagctaactag

SEQ ID NO: 412 - DNA, 15 bp, Artificial Sequence
  Description of Artificial Sequence: Synthetic oligonucleotide
taactagctaactag

SEQ ID NO: 413 - DNA, 579 bp, Rhopalosiphum padi virus
gataaaagaacctataatcccttcgcacaccgcgtcacaccgcgctatatgctgctcattaggaattacggctccttttttgtggatacaatctcttgtatacgatatacttattgttaatttcattgacctttacgcaatcctgcgtaaatgctggtatagggtgtacttcggatttccgagcctatattggttttgaaaggacctttaagtccctactatactacattgtactagcgtaggccacgtaggcccgtaagatattataactattttattatattttattcaccccccacattaatcccagttaaagctttataactataagtaagccgtgccgaaacgttaatcggtcgctagttgcgtaacaactgttagtttaattttccaaaatttatttttcacaatttttagttaagattttagcttgccttaagcagtctttatatcttctgtatattattttaaagtttataggagcaaagttcgctttactcgcaatagctattttatttattttaggaatattatcacctcgtaattatttaattataacattagctttatctatttata

SEQ ID NO: 414 - DNA, 675 bp, Artificial Sequence
  Description of Artificial Sequence: Synthetic polynucleotide
cttgattctaaccttgccgtatggtgccctaacgggttcatttaatcatgcgatgagggttgctataccgcatccattctaaggcgattcaatgcttcatttaggaattttgttgacgattaaaaggtacccccacaaaaacaaaaccaatcttacttgattttcgttttaactgaccactgcgatcccaaattttcgccttcttatcaaagtatgttgtgttctttgggtgtacaacctgagaacttgtctacaactacatattactcgaggaagaaattcggtttaagccgtgccttctcacgtttagtatatctatctggacacaccttcttcatcttctaatccccatctagtctcctgatcagagacgtcgttattaacaaataaccccccttgttaataagagacaaagtacaatcaagctaagttctcttggagttcctgtaggaacttagccattgtgatagagtcataagtctatgtgcatagacagctctagctcaccatttccttcccaacccatcttttcatcagcttaactctatgaatccgatgcaaaaaccattctaacatcttatggtgctttccaagccaaatgagagctcactcttttgagccgctatttaatggacaataaacgttttatagtgtacatcatattgtaaaaacaaa

SEQ ID NO: 415 - DNA, 636 bp, Oscivirus sp.
cctcggtccctctttccgtcgccgcccacgacgttaaatgcggtgttgtggtgcttaggtgccacaccactgctatttgggtccccctttcccctatatatgtttgtttgtttatttcaatttcttgaggattggcacctccttatgccaaatctaaatcgtggaggatcccaggctttctggtctttaacagaactccacgtccaggtcatagaaactggttggtaggctgcctgagtagtccatttgctagtagtcccttgtgaacagggtggctcccgtttactgctggtattcccggtgtaggtcgccatggtggtaacaccatcctgcattgtgtgtgaaccagtaccgcaaggatagcaaggtatgaacacttgtggacgaaatggtaagtgatcaattcactttcatggccggaaggtcacgtggcaatcatgccacccaggtaccctcctctgggaggatctgagggtgggctaagcagaccctgccatgtggctgaacttttcccttattgttttactttgtaacatttatagttgtgttagtgatttgtgtgttgtgcccttgtgagctatatccagtataagttcgcagctagaagttaatccttcgacatcggctgtattggaa

SEQ ID NO: 416 - DNA, 675 bp, Cadicivirus B
caccaacccttgacctgtaatgtcagtggacagagtgctcctctgttcccggttaccgtgttccaggacacgattgtaatcctgcgcctcaccagcgctgcgtgcacgtctgcataaggaaacgtgccttccccatgtctctatcaattctttggtgagtgaccgccctagttgctcatcctatgggattcttctctcatgggttctttgtggcatgcgaatgtcaccttaattggaggtctttaattagatatcctttcttcatctttgatatgagtgtcggaatttgattcctagtctctgcaaaacaaccccacttgatgaattcaacttttcaaccgcacaaacataatcaggtttttaaattgaatgtttctaaattctaaatttagtttatttaagtagtttgccatcttgactcgatgtaaaattgtcatacaagtcttcttttcttttctttacactttgaagtttgcacttagcagtcgttctgcacagctttcgagttttgtttgatcgacatcgcaacttccacccacctctctttttctagtgttgaatgcggctaatcctaacccgagagcaataaacccaggtttattgtcgtaacgcgcaagtcttggacggaaccgactatacacacacctctttaccctttagtacacccttggtacg

SEQ ID NO: 417 - DNA, 570 bp, Artificial Sequence
  Description of Artificial Sequence: Synthetic polynucleotide
gcaaaatgggtacgtagttaaccactgcgtatcaggattgcaggccacgaagggtatttgcatatctttctatgcggtattacggcttaaaacccgttgtatcttgttgtttgactgcctgtatcactagtggccattttatttaggttagagacccctgatagtaggagagttacaaactctttaaaaattgttgaccccggaaaagatggtgacccctgtaagtagttgatcaagaagatctatgcgctggcatagtaatccagtgtttcctgttttaggatgacctctgaaagtagatgaccgtggaaagtcacgtagtgccccaataagcacgtttgggcagcgtgcgctatcacaaggcttgatctccgaggagccccttgttttagctggctggaagccaatgatcttaagtagataagtgctgttgcttgtagttcaacagaaagctttgagtacgtctttcttgcgagaaagaacacatgcattcttatgctctcaattctattatttttattttgggcgaaaggaaagctctcacgcgagtacgaatagccaaccctttat

SEQ ID NO: 418 - DNA, 145 bp, Plautia stali intestine virus
gctgactatgtgatcttattaaaattaggttaaatttcgaggttaaaaatagttttaatattgctatagtcttagaggtcttgtatatttatacttaccacacaagatggaccggagcagccctccaatatctagtgtaccctcg

SEQ ID NO: 419 - DNA, 312 bp, Unknown
  Description of Unknown: PV Mahoney sequence
atgagtctggacatccctcaccggtgacggtggtccaggctgcgttggcggcctacctatggctaacgccatgggacgctagttgtgaacaaggtgtgaagagcctattgagctacataagaatcctccggcccctgaatgcggctaatcccaacctcggagcaggtggtcacaaaccagtgattggcctgtcgtaacgcgcaagtccgtggcggaaccgactactttgggtgtccgtgtttccttttattttattgtggctgcttatggtgacaatcacagattgttatcataaagcgaattggattggcc

SEQ ID NO: 420 - DNA, 577 bp, Reticuloendotheliosis virus
ggggtcgccgtcctacacattgttgtgacgtgcggcccagattcgaatctgtaataaaagctttttcttctatatcctcagattggcagtgagaggagattttgttcgtggtgttggctggcctactgggtggggtagggatccggactgaatccgtagtatttcggtacaacatttgggggctcgtccgggattcctccccatcggcagaggtgcctactgtttcttcgaactccggcgccggtaagtaagtacttgattttggtacctcgcgagggtttgggaggatcggagtggcgggacgctgccgggaagctccacctccgctcagcaggggacgccctggtctgagctctgtggtatctgattgttgttgaaccgtctctaagacggtgatactataagtcgtggtttgtgtgtttgtttgttaccttgtgtttgttcgtcacttgtcgacagcgccctgcgaattggtgtacccacaccgcgcggcttgcgaataatactttggagagtcttttgcctccagtgtcttccgtttgtactcgtcctcctctccctctccggccgggatggg

SEQ ID NO: 421 - DNA, 675 bp, Tropivirus A
tgtcgcatgttgccaacatcaaaattctgggagagtcgcgaactccttaacactgccttgcctcgacggagccgttgttatagtgtcgacgggatacaaacattaaactaaacccacttgcctcgacggaaccccttaccttttattttattttatagtatgaaagtgaatcttgtatgaatgttcatagaaaactgcaaatgagtaccacgtctaacatgagagaatgatactggagaaatccaagtttagaagtcactacgaatcccagcggaaacaagggaattctgagcttctaataggcgtttaagactatttgcaaaattctggtgcgtaagtgatattttcattgcgtagaacgctggtaaccactccggctagtataagcattgttagtcacttattatgaaactccacactatcctttctggagaagcacacaaacttacatggtaaagctagaccattatcttaagcggtgagtacactgcaaccttgtaacaatgcttgtatgactactttttgtatatcttgagcaatattgttgaggtggacatgtccaaaggtaatgttgttgggaatggaggggtccattttcccgtgcacgtagtgtactagtattgggtgatagccttgcggcggatcaaccatgtattttaatccgttgactttcac

SEQ ID NO: 422 - DNA, 592 bp, Symapivirus A
ttgggaaatccccaatgcttctttcaacaccgcctgactatgcggtggcgcttcggctcaaacaactagtcacttccccctcttaactactacccaagacttctaactacccttacctacttatttgtctaaatttcaaacttttattctcacgcgtcttataaacatcttttctatttgttatggtatgttttgtgatttgtgtggtgtatttcatttaatgggatctagtggaccgtgccccggttgggtatccgctccctttaaatgtttgcaagcactcttgacattataacctatcatttagtttacttgtttgtatgatcgtatttctgaatcgtaacatttatgcaattctttctcgccgagacttgtctaggagataaagttcctgcatatttagtgttacggttgtataatggagacttagatagcttcacactgaggacgctttttcgctatccttttgacctgattcaggccagtgtggagttaatgattgtatggatgggccctacaatttgtctaagacttggtgatagcctcgcggccgctcgccatttatacaactgaatagcggttgaaactctct

SEQ ID NO: 423 - DNA, 591 bp, Artificial Sequence
  Description of Artificial Sequence: Synthetic polynucleotide
tcacgcgcttttccggtggtcacccaccgttagggagcgccagcgttcgcgcttccgctaccaggtgacacactcctttcccctcccccattcccgttcccatcctctggactggtttctcctcacgattgaccagcagctgggagctgttaccagacgttggacagtaagtcccggatgcactatagggctggtggctagtgcttggtaagcactcaacgccatacctaatgtgtacctcggcttgccctcctggtcgtggtgaccggctgtttctcttcccttggctccagacgggctggtgtcctaccaccaccgttgcatgcagacctccccctgcgcactcgaacgccctgtcccagcagggttagtatgtgctgtgcagatctgcatgtgacaccccatccactggtagagcaggaagttgccctagctaacgcggcaagtattactttccgctacacgtccttgagattcctcggacctctggaactagggtgactgtgggcttgggaaaacccaccttggtcctgtactgcctgatagggtcgcggctggccgaccagtggatgtagccagttgttttgggat

SEQ ID NO: 424 - DNA, 538 bp, Rosavirus C
cagggagatctccatgaataatcttttccaccctctttagcgtctatgctattgaggacgggttggagccccgttgacccagcgtcagagtgtgtcggtagcaggctttctgctctcgccccatgccggccacacctcccattagtgatgtgaaggttgtaagttacatgtgaaaaggtttctaataattgagctgaatgtagcgattacctaaggtgagcggattcccccacgtggtaacacgtgcctctcaggccaaaagccaaggtgttaaaagcaccccttaggtaggccactaccccgtggcctcagttctcttagaagattcacttagtagtgtgtgcactggcaactcttaagcagagctagtgagtgggctaaggatgccctgaaggtacccgcaggtaacgttaagacactgtggatctgatcaggggctcgagtgctgaagctttacagaggtagctcgagttaaaaaacgtctatgcccctcccccacgggagtgggggttcccccacaccaattttagattgcact

SEQ ID NO: 425 - DNA, 675 bp, Rosavirus sp.
ccaggcatggcgttaaacatgcattcccttcccctagtaacctcccttcgccccttccccacgttgtaccccctccgagatggctgctaaggcgcttgctgctacagcagtctcgtgtttcgggtgttataagtgctttcttttccactccactccctgcctatggggagcggaacggccttgtctcggtcgttgcttcttgcagatcttcacccctccaggctttctggactcgccaggggtggagtagtaggcgcactgtctaagtgaaggtagcagtgttgttggcgaagagttgtggacctactttgagtttgtagcgatcatccagagctagcggatctccccacgcggtaacgcgtgcctctaggcccaaaaggcacggtgttcacagcaccctttggatggcgggggtgcccccctccgcacttaaagtagaaaaacagcttagtagtcaaataacatggctttcctcaagcattcagtgctacatgggactgaaggatgcccagaaggtacccgcaggcaacgataagctcactgtggatctgatctggggccctgggccaggtgctatacacctggttaaaaccaaatctggtagtcagggttaaaaaacgtctaagtcccacccccccggggacggggggttcccttaaaccctcaactgacacc

SEQ ID NO: 426 - DNA, 656 bp, Unknown
  Description of Unknown: Rhimavirus A sequence
cgaattccggacatctcctttcgggggcgagcgtcaccgtgcccctcatggaggcaactgtgcctctaatcggtgacccactgagaaaattttctttctacgtggctaaacaatgcaactttataataacacaaatttaatgcttaatcttaacaccaaagatttgaacatatgtttggaaagtggcacacttcaaacattgcatagttgctaggggtgaagtccctttaaggggttgcagaggatctttcctctttatgagcggctaggagtatcttcttgatattatgtggtcgtgcaactcacttcccagatgtatgacggtgtactaagcgattggaactagtcataacctctttgaattttggtattgcgagtctagcagggggatatttaccgctaaagggtgacacactcgtgagggtggcctttggtgtgtgtatatttattccgcccatcttgcatggggtgctaaaattctaatgctgtgaaataaccattttctgaatacattctctacatttggagtcaaatatgaggaatgccactcaggtacccttgacatgatcttggatctgagagtgggctaattatctaattatttggcgactttctaaaatcttctgtttttagtggtgacaatttatggttataaa

SEQ ID NO: 427 - DNA, 487 bp, Rafivirus sp.
gtgtccgggaagcgactcaagcttttgactgagtctctacaccttcatccgtaacatctttaagtttatgtgcctatggacctctagtgcactgccatcaccgggggtgtattggactggtttttccacaatccattcatcctgaggaattttggctttgttactaggatggtcccaccacacgcttatctgtgcctattgtgtcaaccatgttcttaagtagttgtgcccgtgggtgagtagataaccacaacaatccgataaagcatctcgcaaggatgtgagtaatggagtgtatgtgctacagagacccacaacctgaaccaagagagacacagtgaggattgtaaagggggaactctttgaaagggcatgtcccgcaattcctactgactgacaccgggggttggtgtcggtggattttagcaaatcctgttactgggtgatagccttgtgcacttcacttggttcttgtataagtgctgta

SEQ ID NO: 428 - DNA, 560 bp, Rafivirus sp.
tgcgaatttattcgcacagtctcttttcccccatcttgtgtgtgtgatggggtaagccgcagagtaatacctactctgctgcaaacacactcactcttttctatctactttatatcatgtaataataagtagggaacatattcaattcatattgttcatctcactgaacccgcatgaaggactgcattgcatatcctggacgaagtgacgtggaatatttggacatttatggattggacaccattacgctttgtgcctctacggagatgtaaccataatcttaagtagtagtaccccagcacaagaggataaagtggcatacacgacaacgggtgttgctcgcaccttagtaatgtggatgttcacccttggagcgtgctgaaactctgtgggtaaagacacacattagtacaaatgtgggggaactcactgaaagggcatgtcccgtgtactggtgtgccggaaagtgggggtcgctttctggagaacttagtagttcttgttattgggtgatagccttgcggcggatcaactcacagttttaatccgttgttttgcat

SEQ ID NO: 429 - DNA, 675 bp, Poecivirus sp.
actacacaatcgcaacacgcgcaagtttgtagtttgattggcgtgcaaatgtcaaatcaagcatataacacaatttggtggctgttggtgtttgttataggaattttggttgtgttgaaattgtggatgtgtaggaaatatgcacaattacgtcagcgtcaggagttttataacctggcgcaacaccaaaatggtcttcgcgctttaacatcaccagcgaggtgtaaacaaattgaagttgaattagatcgtgtataggccagggaaccatccctcccaacgccacatcttgtggggaagttgggataatggtgggtctatatgaattggtctgtagacccacagtgaagagtgaatagtatgcttgcggttccatttgttaatggtctagcatgggtgggggcggcaaccccgtgaggggttccccactggccaaaagcccaggggttagtcatttcaaccaaggaagctggtaacctggtgacctgaacttgagtggtgagacccccttgctagagtgtgtaaaccgattgtaagcattttgtttgcttagtatctgtggtataagcagtcaattttgtataggctcaaggctgtggtagttagtagatgcccggaaggttattactgatccggggaccgtgactatacattaggtaaaccggtttaaaaacc

SEQ ID NO: 430 - DNA, 519 bp, Unknown
  Description of Unknown: Megirivirus A LY sequence
ttcgggacactggatgggcgacttggtggggctgccactctatcttgacctttcgttactgactttcggatctctgactcctccttgtctcttgcgtttggtccacggacggactaattggaatgtttactggctaagcctcgttctgaaataccctagccaatgggttgtagtaggatcctggtgtttccattaaacctcttccgaccatagtagctagagttatggctgtgtaggatgtgggtaagaccgctttttgcgtatctcccacaagacaccggattatggatgtgtccgctggataaggctcgaaacctcccaactgaaggtggtgctgaaatattgcaagcctaggttgtgtagaggcaagtagatgcctgccgcgacattcgtcttccgcccttttgggttagtagtgtacctacatggacgtggggctgggaatccccaccttgcataacactggttgatagacctgcggctggtcaagttactatggtataaccagttgaaatggct

SEQ ID NO: 431 - DNA, 675 bp, Unknown
  Description of Unknown: Megirivirus E sequence
gcttggcaacctcatatcgttactctgccgaccagtctgggtcgtgtggccacacaatgggattcgttctgttgtgtagagtcacatggcattactgggctgatcggtggggatccgttgccacccctaaacccttacatttactggactgcttttcttggccccggaatgattcgctcacccgcgatgaggactgttgttcttattatggcaggattacgcgtctggtccgcgtaaggactaattcctatgtttatacgttactaccttgttctgaacggtgggcgccaccccgcctagtaggatcctggcttatcgtgtagacctctagggaccacattagctagagtgtaggctgctatggatggagtagtgacccctttttgggtatcactctctaagactccggaatgtgtcatagtacgctggaaatccttacttgtttttccatgagggggaggtggtgctgaaatattgcaagccacccctcggttaaaacagtttggtgccgcttatgccatattaccgccccttgtagttgggctgtttttgcagctccgggttagtagagtaccatagtggacgcggtgttgggaatcaccgccttggctgcacactgcttgatagagctgcggctggtcaagctaattgtggtataaccagttgatttggcat

SEQ ID NO: 432 - DNA, 639 bp, Unknown
  Description of Unknown: Megirivirus C sequence
ttcccgaccggtctggcaaaccggacggttatcctggttagatgtctgatggttgctggaacgtggtggctactgctgccaccttctggcttcctttaatgggcatctagctgggttctttgccacaatccatcttactctcttacccattttctattacccagacttgttgttaactggtaaagttgacctactggcttcgttttgagactattctggtgttggtggacactctttccacaagtagattgtatggagttcatgctcgttttgaaccgggaatggcacaacccgtagtaggatcttgcctctgccatactaatctgcgcctgttgcttttagactatgggctgctaaggatgacattggaacccctttttggatattccatgtcaagtcaactgtttcatctggtgtacgctggaaatccttgttccgaggtcttgtctggaggtggtgctgaaatattgcaagccacaggcagttccttggacttggtgccgctatcagatgctacaccctctatgggcaaatgttgaaccttagtggacgcgtgagatgggaatccacgccggccatagactggctgataagctcgcggctgatcgagttgcaacagtaatcagttgatttgccact

SEQ ID NO: 433 - DNA, 497 bp, Ludopivirus sp.
tagacccccacctagcccttttccccgtcagtggggggcttactcactgggcatctgttaatctggcctaactagattgacaccactcccttggaacgtaactccacgctaactcactggctctacgcacagacacacggtctttctgctatccccggggaagataccagatggcgaccggctgtcccagcggcctagtagctactcgggttgagtacccaccacggttttgacgcctgctaaaattcaagagacagaggtaggggtgcttagtgtgtgggggaagttcccacaagcgaggcaaagcattgctccctcgcgtcaccgggtgcaaggtaaattggctggacttccgctctacccttgctactcgccctcttcggagggttcgaagtgacactaggtatacgcatggttgggaaaccatgcctggcctactactgggtgatagcctggcggcgggtccgtctcttggcttatacccgttgatttgggat

SEQ ID NO: 434 - DNA, 610 bp, Livupivirus sp.
tatctacatggggatccaggctgtatggaatgtctgtcttaacaagcactataccagaaagatccacccaaagtggtgggactgggactgtgaggtgagaaatcccgaaaccagccttctcaagcgtcggacgatctttctgttttagtgaacaccttgccttttaaatggatgacaacaccccttcagcaaatcgcaatctgaaatcccaaaagactgtttagccgaactctggtaatcactccggagaagtaggatacgcagcccctgtggactcttgatttcaggactcaaggtagctagagctggaacttcatggaatgacaaaggaatatatgcacattgtgcgctttcctggccttgtagcccgtcgtgaggatatgtcgttgggaatcgacatcttagtccagtactgcttgatagagtgtcggctggcacagttacctgagaataagtcagttgtacttaacatgaacaaaaaaaataactaccacaactaccacaatctaccaatacttgaattatgctgaatctcgtacagtaaaaacgttccgtggaaggacaagtattgaagtgcggttacatcatccgatacgcgctggatccctca

SEQ ID NO: 435 - DNA, 629 bp, Aichivirus A
cacccatacacccccacccccttttctgtaactcaagtatgtgtgctcgtaatcttgactcccacggaatggatcgatccgctggagaacaaactgctagatccacatcctccctccccttgggaggacctcggtcctcccacatcctccctccagcctgacgtatcacaggctgtgtgaagcccccgcgaaagctgctcacgtggcaattgtgggtccccccttcatcaagacaccaggtctttcctccttaaggctagccccgatgtgtgaattcacattgggcaactagtggtgtcactgtgcgctcccaatctcggccgcggagtgctgttccccaagccaaacccctggcccttcactatgtgcctggcaagcatatctgagaaggtgttccgctgtggctgccagcctggtaacaggtgccccagtgtgcgtaaccttcttccgtctccggacggtagtgattggttaagatttggtgtaaggttcatgtgccaacgccctgtgcgggatgaaacctctactgccctaggaatgccaggcaggtaccccaccttcgggtgggatctgagcctgggctaattgtctacgggtagtttcatttccaattcttttatgctggagtc

SEQ ID NO: 436 - DNA, 675 bp, Aichivirus sp.
tactccattcagcttcttcggaacctgttcggaggaattaaacgggcacccatactcccccccaccccccttttgtaactaagtatgtgtgctcgtgaccttgactcccacggaacggaccgatccgttggtgaacaaacagctaggtccacatcctcctttcccctgggagggtccccgccctcccacatcccccccccagcctgacgtgtcacaggctgtgtgaagcccccgcgaaagctgctcacgtggcaattgtgggtccccccttcatcaagacaccaggtctttcctccttaaggctagccccggcgtgtgaactcacgttgggcaactagtggtgtcactgtgcgctcccaatctcggccgcggagtgctgttccccaagccaaacccctggcccttcactatgtgcctggcaagcacacctgagaaggtgttccgctgtggctgccagcctggtaacaggtgccccagtgtgcgtaaccttcttccgtcttcggacggtggtgattggttaagatttggtgtaaggttcatgtgccaacgccctgtgcgggatgaaacctctactgccctaggaatgccaggcaggtaccccaccttcgggtgggatctgagcctgggctaattgtctacgggtggtttcatttccaattctttcatgtcggagtc

SEQ ID NO: 437 - DNA, 675 bp, Aichivirus sp.
tactccattcagcttcttcggaacctgttcggaggaattaaacgggcacccatacacccccacccccttttctgcaacttaagtatgtgtgctcgtaatcttgactcccacggaacggatcgatccgctggagaacaaactgctagatccacatcctcccttcccctgggaggaccccggtcctcccacatcctccccccagcctgacgtaacacaggctgtgtgaagtccccgcgaaagctgctcacgtggcaattgtgggtccccccttcaccaagacaccaggtctttcctccttaaggctagccccgatgtgtgaattcacattgggcaactagtggtgtcactgtgcgctcccaatctcggccgcggagtgctgttccccaagccaaacccctggcccttcactatgtgcctggcaagcatatctgagaaggtgttccgctgtggctgccagcctggtaacaggtgccccagtgtgcgtaaccttcttccgtctccggacggtagtgattggttaagatttggtgtaaggttcatgtgccaacgccctgtgcgggatgaaacctctactgccctaggaatgccaggcaggtaccccaccttcgggtgggatctgagcctgggctaattgtctacgggtagtttcatttccaattcttttatgtcggagtc

SEQ ID NO: 438 - DNA, 610 bp, Kobuvirus sp.
gtaacttcaagtgtgtgtgctcgtaatcttgactcctgccggaatgccgcccggttcagtgaacaaacagctaggcaagtccctcccttcccctgtggtcggttctcaccggccaccatccctcccccagcctgacgtgttacaggctgtgcaaagcccccgcgaaagctgctcacgtggcaattgtgggtcccccctttgtcaagacaccgagtctttctcccttaaggctagcccggtcccacgaacgtggaactggcaactagtggtgtcactacacgcctccgacctcggacgcggagtgctgttccccaagctgtaaccctgacccaagactgtgctgcctggcaagcaccgtctgggaagatgttccgctgtggctgccaaacctggtaacaggtgccccagtgtgtgtagtcttcctccagtctccggactggcagtcttgtgtaaagatgcagtgtaaggttcaagtgccaaatccctggaaggagtgaccctctactgccctaggaatgctgtgcaggtacccccaacttcggttggggatctgagcacaggctaattgtctacgggtagtttcatttcccatcctctcttttttggcatc

SEQ ID NO: 439 - DNA, 576 bp, Kobuvirus sp.
tttgaaaagggggtgggggggcctcggccccctcaccctcttttccggtggccacccgcccgggccaccgttactccactccactccttcgggactggtttggaggaacataacagggcttcccatccctgtttacccttactccactcacccctccccttgaccaaccctatccacaccccactgactgactcctttggatcttgacctcggaatgcctacttgacctcccacttgcctctcccttttcggattgccggtggtgcctggcggaaaaagcacaagtgtgttgttggctaccaaactcctacccgacaaaggtgcgtgtccgcgtgctgagtaatgggataggagatgccaataacaggctcgcccatgagtagagcatggactgcggtgcatgtgacttcggtcaccaggggcatagcattgctcacccctgaatcaagtcatcgagatttctctgacctctgaagtgcactgtggttgcgtggctgggaatccacgcttgaccatgtactgcttgatagagtcgcggctggccgactcatgggttaaagtcagttgacaagacac

SEQ ID NO: 440 - DNA, 513 bp, Kobuvirus sp.
ccaccgttacttcactccactccctcgggactggtttggaggagcataacagggcttcccatccctgttcaccctcaataccacccaccctttccctcaaccatccctatccacaccccactgactgattcccttggattttgacctcagaacgcctacttgacctcccacttgcctttcccttctcggattgccggtggtgcctggcggaaaaagcacaagtgtgttgcaggctaccaaactcctacccgacaaaggtacgtgtccgcgtgctgagtaatgggataggagatgcctacaacaggctcgcccatgagtagagcatggactgcggtgcatgtgacttcggtcaccacgggcatagcattgctcacccgtgaatcaagtcattgagattcctctgacctctgaagtgcactgtggttgcgtggctgggaatccacgcttgaccatgtactgcttgatagagtcgcggctggccgactcatgggttaaagtcagttgataagacac

SEQ ID NO: 441 - DNA, 675 bp, Kobuvirus sp.
gggggtggggggggcctcggccccctcaccctcttttccggtggccacgcccgggccaccgatacttcccttcactccttcgggactgttggggaggaacacaacagggctcccctgttttcccattccttcccccttttcccaaccccaaccgccgtatctggtggcggcaagacacacgggtctttccctctaaagcacaattgtgtgtgtgtcccaggtcctcctgcgtacggtgcgggagtgctcccacccaactgttgtaagcctgtccaacgcgtcgtcctggcaagactatgacgtcgcatgttccgctgcggatgccgaccgggtaaccggttccccagtgtgtgtagtgcgatcttccaggtcctcctggttggcgttgtccagaaactgcttcaggtaagtggggtgtgcccaatccctacaaaggttgattctttcaccaccttaggaatgctccggaggtaccccagcaacagctgggatctgaccggaggctaattgtctacgggtggtgtttcctttttcttttcacacaactctactgctgacaactcactgactatccacttgctctcttgtgcctttctgctctggttcaagttccttgattgtttttgactgcttttcactgcttttcttctcacaatccttgctcagttcaaagtc

SEQ ID NO: 442 - DNA, 675 bp, Kobuvirus sp.
gggctataaatatgggcattcctcttcccccttccccttttgaagatgagtgcgcatattcttgactccgcctggattggccgcccaaggcgtgaacaagcagctaggccaccatgacactgcggtggtgtccgaacccgcgggtgccttcacgggcacctgtggtatgtaggactcccaccgtggtcttccctttccccctcaatctttccccctggttcgactaacgggaccagtgctggaacctgtccggtgaacggtatagcaggcccccccggcagaaacacccggtgcttaccccttaaggctagcccccttccatgaatttggttggggcaactagtgggtgtacagttggcgtgaaccctccggtctaggagtgctcttgcccaatcctctgtgtgtgccttgcagtagggactggcaatccttcgcgtaggtgatccgctgtgccatgccatcctggcgacaggaggcccagtgtgcgcaacctacgtcccttctgggtgctgcattgcattacctttggagtaagcttggtgtgccgaaaccccagggtttacgtaccactcgtggtgtgaggaatgtgccgcaggtaccccatccttgaggtgggatctgagcggtagctaattgtctagcaccactttcttccttttttctttgctggtcacg

SEQ ID NO: 443 - DNA, 604 bp, Aalivirus sp.
ttgaaagggggtgctcagggtagctccctgagctcttccctccaccctctttcaacgtctggcccacgatacgggccacctttcaatcttaactaactatccctttaatctatttggattttctggtttagaataatttggaacacataattggattatcttttaggattgtggataggatttgttcgggatatcactcccttcctgtgctaacacatattctaattccctcctttgtctattatctcttggaggtggtgctgaaatattgcaagccacttgagtgtatagatgaagtaggctcaagatgaatgttgtgttactcaaggcaagtgtagctatcactaagatattggtaacgtgaaacggattaccggtagtagcgtgatcttccgtcttagtgctctagtgactagaggacaacgacatggcatcacatatcttaaccctccagttttggcatccgggacagaatgggctggatatccgctttctttctggggtatgtgatgggtggtattggggtaaccaccttgaccatgacgctcgataagagtgaccgcctgatcattgaaacctctagtataaaattcaggctgaaatc

SEQ ID NO: 444 - DNA, 445 bp, Grusopivirus A
tgcctgagtaggattgtgaatttaggtatgagagggttagccaacccattctgaaccataatagatacgtcaatctgaatccatctaaatctatctcttaggcagtggtgctgaaatattgcaagctactagggatagacgtgatctgattcaagaacctatctaatgtggtgatgagaaggctaggtttatccatagtaatcccttgttctgaacaggcaatgcacatgctctagtaggatctcgggctctgcgattggctctaaaccgaccaatccaggtagaggcactaagtgtaggacttgccaaaatgtattacatgctggtaccgactcactagtctggaaactccacactgaaagtgactggggggggccccatcacatttgtgctactgcttgatagagttgcggctggtcaacttggattggtataaccagttgaa

SEQ ID NO: 445 - DNA, 537 bp, Grusopivirus B
gccatccgtaggttctggtaaggttccatcaactgttggggcgctagttgctatgaccgcattcacggacggatgatttatagtatcacccaatccgggcacaacttctttagccacttcttccacattactaagggctctcttgccgagtttcaacgtctagtccacgacacggaccttcctacttttctatcttcttattttctctactaaattggtatctggtactgaagatatgcggattgtgattttgtgcctgtctaaactaaccctattctagggttaggtgggtaccatatactaatggtgaacaggattacctatgtatccattagtccctatggatctggcgacccacaaactcatgttcatagagaggctaagctgagtgctcgccgaataagcattgcttcaggtgccgactattgtctggaaaccactcagtgatagctataggggggggccccgtagcatctgccttactgcctgatagggtggcggctggtccatgaacatgcagtaaccagttgacttgac

SEQ ID NO: 446 - DNA, 562 bp, Unknown
  Description of Unknown: Yancheng osbecks grenadier anchovy picornavirus sequence
ccttagggtctggaatgcgtcctttctgggcacttccacaatcctaaggtaattttcaacgccagcgatggagcgatatccaaagaacctttatgttttagttcgtcttgtatgtttataaaatataaaattgggattagcaacccacaaaaacatttttgttattctcaccacatgagagggtggttaaacctcttcgtaacctatcttgcttgattggctacttgggctagatttaggacaacctctttagcaagcctaaattactcctcgtacttgcacctggtaacaggcgtacctggaggttacggtggcgctaacttggacttctcgttaattcgtgcaagtttaaatgatgcctattttgaatacaagaaagtatgatagtaacttagggcgtgaagttccgcttaacataaggcagtataagtactaagataaggtgtaagacctaccttaataactgttgtcttttctcatggtctttccgtgggagcccttgctaggggtaaagttaagtattctcaaataatttttcattcaaactctttctctctgtttt

SEQ ID NO: 447 - DNA, 675 bp, Gallivirus sp.
ccactcgcacttcctggatagtgcgttagatatgcccgacatatcgcttccaggaccaaagccccccttttctctttcccaaccagcttcgccactcaagctgtaattccatgtccggtctttccggccttagtatcatggaaatgtggtcgtgctcaaatgaaattgagttgacattgatcaatgaaagttgcactgaactttgctaaactggctagcgccacctggtgtgtgccgttggtctcctcacatggtaacatgtgccaacgggcccgaaaggctagtgggcaattaccgctccaagggaggggtacccaccccgacctgaacagcggtaatgaagctcacctcccaggctctgaccccgagaagtttagttatttagtaggtgtaattagtacttgtgattggtcaatttgatagtagtttgaaacgttatggatgaatgagtagaccccctgaaggtaccccattacatgggatctgatcagggccacattctgcgtgtctccccgcacttgtggttaaaaccatgaaagttcatcccaaacaatcttttcctcttctttttcttttagtggtgacaacctactggattggtgattaccaatctgtactagtgttgtattaagacttgttgtgtggagaaaatggactctttcaagaagatttttg

SEQ ID NO: 448 - DNA, 673 bp, Unknown
  Description of Unknown: Falcovirus A1 sequence
taaaaggggacgcggtgtggcagctttggctgtcatgccgtgttctccttttaccccaaggactagccttgggggttttccaaattcctttccctgtaggctttacttctctttatctatcttttctgtaactaagttttgcctattctaaaaatattttagaatgtgtttggatgtaactaagtttgtgcctgccctaaaaatattttagggcttgtttggataacctcgtcccttgtgttcagtgccgcacaatttgctaggcactgttcacttcctttgtttgtccattatgtatgctaaggtatgaattccatcatatgcttagcctctacatgcataatcttattccctccctggtgcaaactacgcccccaacatatgtgaatcttttaagcatattcctgaccccacacatatatatgtgttctcgtgaattcccccaccgtgaggtggtcacttggacgtggtgtgtgtcacacagcatatatatgatgcaggatgttgtttttaagataagcatatgtccttagtgctttgcatcatttcctccacaccccgtgaatgcggctaatcttaaccctgttgggtccgtgggtaaaccaacccattaaccacaggacggaaccgactactttcgggagtgtgtgtttctttttcttcttttgtcact

SEQ ID NO: 449 - DNA, 665 bp, Tremovirus B
ttcaaatggcccctgggttgatacccagtggtcatttggacactttggtaaggaggtgtaattatccttcccatgtggaacctagtgcttaggtttactttatatgttctttgtttgtcctttgtactttctatcgggcaatcttgttgttcaatacaatatgtatttgaactgcctaagataaattcagttttcaaccaacccctctcttggggttgtgtctttctttctttcttatatcctcttaagctgacttacttgctaatccgactcctcgtcaacgggagggtaaagcagtatcactagggtattgtgatgtaggagaaaaagtaagtagagatagtgcatgtaacgaaagtgacttggtactttaaactctcttaatcccaaagtgtggtattggtcatgttggagtaggctacgggtgaaactccttcacatttagtaatgtgttcacacgctaacgctacggtagatgacagactaggtcttattctcaacgtagggggacgggtgtatgttcatgattagccacatattaaggttttgaggggctgagtcatataagtatgtgcattaatttctggtactggtccctggggactggcccttttctaggttgattttagtttccccaatttttaaaaactaatgagatttacgac

SEQ ID NO: 450 - DNA, 675 bp, Hepatovirus A
tctttggtctggggaactaaaataccagacccgcgtttgcctagcgatataggctttaattgttgtttgtcattgtgcgtttgatatgtgttttaatgtaaataataattctagcaggttctagttcttgatcatgtcctctttaaggcactcatttcaacttgctatctttcttttcttccttggttctccctacaccaaatgcactggccgctgcgcccggcggggtcaaccacatgattagcatgtggctgtaggtgttgaaggctgggacatgaacatcaatggaatagtgcgcatgcttactggggtccattgaagtagtgggatctttctattggggtaggctacgggtgaaaccccttaggttaatactcatattgagagataccttggataggttaactgtgctggatatggttgagtttaacgacaaaaagccatcaacagctgtggacagaacctcatccttagattgctcactatggatatgtgctctgggcgtgtttcttgcatgatggccattggtcaattcatgcctgggccaatgtaggattagccttaaattactttttaaaagtagcctcatttagctggactaatggtggggcgtatgatcctgcatttggcctctggggtaatcaggggcatttaggtttccacataatagcaaat

SEQ ID NO: 451 - DNA, 675 bp, Hepatovirus sp.
gcaaggggtggttttaaccttgcacgcgtttaccgtgcgttaacggttttccatgtttgtatgtcttgtttgtattatgtgttttgtaaatattaattcctgcaggttcagggttctttaatcatgttgggctgtacccacactcaacttttggccataagtgagtttcttaacgaaccttttaacacaggatgttattagggcccaatattttccctgaggccttctttggcctctattttttccccttttctatctccttgtattccgggctcacgtgatgccaatggactgacccatgcgcccgtgggggttaactactggagtagccagtagctgtaggtgctaaaagtcacgtacgtgtaagactggacgagacctctcagctataactgaaagtagtaagtatgtctgaacttcttgaaggggtaggctacgggtgaaaccccttaggttaatactcatattgagagatacctctgataggtgaaggtttccggtagaggtgagtttaacgacaaagcctctcaacggatgtgggcccacctcatcagcaagatgctttcatacccaataccgtaggggctgggttgttgagttcagtcccaagcgtccctcccgcaaggttgtaggggtactcaggggcatttaggtttccacaattaaacaaataca

SEQ ID NO: 452 - DNA, 675 bp, Hepatovirus D
ctttggatgcccatagtgcgggggtataaataccgcactccctttagctgttccgagggtatcggaacctatatgtttgttttctgtctgtctgtcagctttatgtgtgctcgtcccctttagggcactcatttcagcttgctttcattcttttcttccccggttctcaccttaccggaggcactggccgttgcgcccggcggggtcaacctagtgattagcactaggctgtaggtgtctaaagtggtgacattaagacttggtaactgatttcagcactgttaactgatgttggggatgacttgattgatcttctggaaggggtaggctacgggtgaaaccccttatcttaataccactatgtagagatagattcagtaggttaagggcagtggataaggttgagttcattttggacaataaaccttcaacactggtggacccaatctcactgaccagatgctttcttgactgatccttcagaggggtgattcttctgaataggttgccttgacactgatgcctgagacccattgggtcgggccttaaatcatggaactccactggactttcatggcctagcttctgccttagacagactctggggccccacgaccctctgggcccttcggggtactcaggggcatttaggtttttccacaattaaaagagtta

SEQ ID NO: 453 - DNA, 560 bp, Hepatovirus sp.
gtcatgtttctctttaagaacactcaattttggccataagtgagactcttgtcgaacctttcatgtcaggaccatgttagggccattatccttttccctggggcattcttcttgcccctgtttcatctttctatcatctttcttccgggctctcacaatgccaatggagcgaccgatgcgcacgtcggggttaacccatggattagccatgggctgtagctgctaaaagttgtgactcctgaagcatactatcaatggtagtagatgtaactgaaacactgaagcttctctgatcttgaaagaagggtaggctacgggtgaaacccttcaggttaatactcatattgagagatacctttggtaggttaacgttggcggataatgttgagtttaacgacaataaacattcaacgcctgtgggcgaacctcaccaatttcatgctttgaagtgaatgtgcgtagggtctctatcggagatgctatgtggatggtgccctccctggaaacaggttgtaggggtactcaggtgcacttaggtttccacattttaaagatttttc

SEQ ID NO: 454 - DNA, 675 bp, Hepatovirus I
ggctgcctgtgtctcaggggtaagtactggggccgcgttgaccgtgcggtacggttatgcttttagattaggatgtccgtctgtccggcactctcttttgcttaaaatggccttaaatccatgggaggcgtaaccatgggccctttgttacctagacatgattgcattgggggccgtccttggggcttaggccccagccatttctcttgactcgtctaagagtttacttcatccttttctttactttattttccaggctctcagcatgccgacggctctgaccactgcgcccggtggggttaactgcatgattagcatgcagctgtaggagttaaaagtgctgacaggccaattctgacgtaagtccactctatattaacttgatcaagtaaggttgattgatctttgtgagagggtaggctacgggtgaaaccctctaggttaatactcatattgagagatacctccagaaggtgaaggttggcggatattggtgagttcttttaggacaaaaacctttcaacgcctgtgggcccacctcactggcacaatgctttcatccccaattgtgatgggtagtttggactgaaatcaggagtaacctgccctacgagtttaggggtagttcaggggtatttaggcttccacatttgatagagtttatgagagtgagcc

SEQ ID NO: 455 - DNA, 527 bp, Hepatovirus C
ttcaaaagccccagcggggtttcattaccccgctgtggcttttggacttccctaggatggggaagtaaattaccatcctcgcgtttgccgtgcgttaacggctacttttcttctagctgtagaagtaaaattcagcatgttttatgtttgtttgtcttgtttgttatatacatttttacactcctacaaatgcacatgaagaacagtttgtagagattaacaaacgcttagctgaacctaggtggtgaatctagtagtaagataagtagaggaagctataccttaagttggttgggccctcgtgtttgctctataaacaaaaccaagtgagtagagtggatgaacagtactaaatccctgagtacagggaacctcacaggtgtgatacacttatgtctatgtgacctggttggaggttgggcgtgccctatgatactggagtgggagatcttttggggaacccacgttttcacactgcctgatagggtcttgccgagagactcacttgtttcggctgtacttgtaac

SEQ ID NO: 456 - DNA, 665 bp, Fipivirus A
tgcgggtaaactcccgcatgtgtgaatgaggcgatgtcccaggaactaactgccgatcctggttttaactacgatccgtatttgttactaatgcgatatccccccattgtttgcctccatgttgttttcaacgcttttggccttgagtgttatcaagtgttttagcgacatagtgggaagctacggctgcgtccccatttttgagtggcgacccagttttagtggccactctgtccctgaactgcgctataatgtgaatttatgttcacaaaaacggactgatgtaactgttaatgactaaggaatagtacctcactgaagtatcaagaccccgttcgagcggtgtacatatatggatggaaaccttgtctgagtcatctcgaatactaatcaatgagggatgtcgagtaagcatatcatgaaccacatagaatagtggggtttcggggttagaggctctctgcagcaatgtatctctaacaccatggccgaaatgagagatagagaccacgatgtttgtgtgtaagtaatgatgtgtggaaagaaaattctgaatgttggtatgatatcagtctaaggggagtggctcacctaagagctacccaaacatttcacagcagacaacataacgtactgagagtagttggaaggttccagaaatcagt

SEQ ID NO: 457 - DNA, 467 bp, Fipivirus C
cgcggttaaacccgcgcaaccttctttcagccgcgtctgagtagcgcggttagtcctgatacacagtttcctgttgggtactgtgtcttcgggtgaatgctcttgtgtgaatgttttaggctgtttaagggaagcgtttccccgtgcgctgtgagggtttctcacgctctttcggggtgcagtctcttctgttgttcattaagatgtatggatgcactgttgtgaaggatttgtgaactggggatcgacaccccgtgaggggtgccccagtgtccataggagtttgctggagaggtgtgttgctgtagtgactatccgtgacctggcattctaaggtgttgaccccaacctgtgagggtctggatcgcagtgttgaagtgctttggagggttcaatggggtttctgtagtggatattatgtgcttgacgactactggtacgagtgtattgggggtctacatgtgtga

SEQ ID NO: 458 - DNA, 657 bp, Fipivirus E
ctcttccgatcttgggggttcgcccccatgtctcatttcaactagccgtgtgtctagttaacgcaccgcctcaccctggtcgttatcgggtcggttcttgcgaccgttagatcgtgagcgtttctgaggatcagttcgtataagttctccggtgtggcgaccgtaaaatcgtcacgtcccatgcaatagatgacgttaaactcgtttgccagttacataaaggaatgttgttacttttaaattgtctgttacatttaacatcttgccagtatgatgctactgtacactacgggtgtaggaaccttgtagtgtgacgtatcactcatatgtggatgggtgctccagacctttatggaagctctcagttagtagtgatccttgacttcattgagccctggtaacagtggaagtcaagatgtatatgttgctcaacacacttcggtgctacgaagctgtttgtggaagtactggcgaggttcattctgaatcatatgtttgtcacatagtcagggagtgccgtcgcttacgacggaccctttttctttataattacaaatctgtgtctcaagtgttgttggctggttttcttcttctgttttcattgttcatatatatacgtcagagtgaaagactcggtatatacaaaactgatccaga

SEQ ID NO: 459 - DNA, 506 bp, Aquamavirus sp.
ttcaaaggtggcgggagagttggcctcacgctgtttagcgtgagagctggctctcctgccccttcccctgagccggggatcttggctcattcccctcttttctatcctccctcattggactttacggatgacccggcataaacttgacaaccgatgttggatttcccttgtggctgtgatggaggacataccctcgggtgtagttgtgtgcgtgtcgctctgcgactcgagcttcaaagtggtgctgaaatattgcaagcgtcgttgctcgattaacggagtggtacaatcctatgaacccaagtgcattcatgcgaaagccccggaggggtgagtagcatggactcgaatcagaagagctggagctcgcttggtacggcacgtagcattgctttgcctaaagaccaagggggtatggctataggtgggggcctatagcttgtccagtgctggttgacagactcgtgctacgcgtctggttcgagtataagtagctgcaactcact

SEQ ID NO: 460 - DNA, 548 bp, Avisivirus A
ttcactcgctttccccccctctctataggggcggtcttttaattcttattaatttcctactttactatcaaatttcttctaagtagggactgaggtcacttagccctccctctcctgggctttccagggttatagaggttctaaagctaagccatgtgtcttgagctacacttagtacaaaggtttagtaatgattgtacatgccagtaaccttctagtgcccatggattaaagagtggtaacactctccatggggcccgaaaggctagtgggcatagttggcatcaaggaaggggtccccaccccaacctgaattgctggctagaagctcaccttagaagaagtgctgggtgacaacgtgtccaatcgtgaacgactgatggaaacgtgtggagatggatatgtgggggttcactgagtagatgccctgaaggagaaatctgatcaggggcccgtgactatacgctaggtaaaccgggtataaaaaccatgaaaggtggcccaaaatctcttccttttattttatttctatgttggtgacagtcaag

SEQ ID NO: 461 - DNA, 492 bp, Avisivirus B
caccccctactgccctaacccccaaagttagttatagggtggctccctacccttactccacggggtaagccctaacccggttgaatctcaagatcagccttagcgaggactattagtaccgctcaaaccctttgcctgtagtgcccaggggtcacagaggggtgaccctctccctggggcccaaaaggctaggtggcaagacagggtccaagtgaggggctactctaagtagccccaagctgaacatcctgtctgaagccacccttgcagggccaggtttgattggggaaactagacaccagctttgtcctgggattggggggatatcgagttagtccaggaggtgcgagtagatgcccccgaaggtaccccaggcacatctgggatctgatcgggggcccgtgactatacaataggtaaaccgggttaaaaaacatgaaagcgcctctctctttcctacttcttttattgactggtgacaaaaatagcagt

SEQ ID NO: 462 - DNA, 517 bp, Crohivirus A
gttgaagtccatttcttgcttgcccccgatgaatcctgttaaggcctcacggccctaagggtgaaactcggttatcccctcctgtacttcgagaagattagtacaacactatgaaatctacatcttgtgatccgggataaccccaatcccagaaacctgtgatgggcgtcaccacccctcttatggtaacataagggtgtcgccgcgttggcacaggaccctttgggctggatgtttttagtaatggtgtcgaaggtcctattgagctacaggagtttcctccgccctggtgaatgcggctaatcttatccctgagcctaaggttgcgatccagcaacttgatggtcgtaatgcgtaagttgggggcggaaccgactactttccagaaggcgtgtttctttgttttgtctgttactatggtgcatgatatagatattgaatatttgatctttttgagctgtttcttatcttattgctacatcctttcaggtgttggatttacattttggttaataag

SEQ ID NO: 463 - DNA, 393 bp, Kunsagivirus B
gattttctggttatcccttttggacttggtaggggcccacgtgcccacccacctctgtgtgtgttgatttctaatcgatgcctggcagtggcggccacctctccttactggtaaacctccggtgagtgaagttgtcaagctacaggtaccgtgcaggatgaaatgcgcacatgtgaacaaactaggagtcatacaccgggtcaaactctggaaacggagtccgggactctgaccttggttgggtgagctcgaggcatcacattgatggacgcgattcgctatccttccctagtaggaccttgtggtgtacccctggttgggaatccagggctggtcgggtgcagggtgacagcctgttctccacctcaaccattgtaggagaaatcaacccct

SEQ ID NO: 464 - DNA, 675 bp, Limnipivirus A
ttctttggatatccatttaacgtgtaccctatacgataattggggtggattctggatgcctagttccagtgattggttaagaactcgtttactacgtatagtatgattagcaaagtgctcgattgatcacgtaatgatctatgtggttaaaaacccagtagtatggtatatactcagtagtgtacactgtgagtacaactcttggcgtagagagaacaattcacccgaatccgtggcgtatccatggaaataagtttacctaattgtatgttacaaggcatatgagacatttatgagatatggtttattttgactaaacgagtgtagaggtggtggagtctatccaacttcaagccatgcaattgttgtgttgattgatatcattgaccatttttgtggattgtgtacacatacaatttgaaaattaaccccctcaagaataagacatgggaccattcgtggtagataccgtgctcggatgcttgagattagatgggttagactagttttggaatgagattgccgagaaagtcccgctagacatgttttacaagtcgtggtattccgctagactttttcgcagacacatggaagggtccatgtgttgtgcaattgcagggtgacagcccaactgcagagttttccttactagaataaaaatctgttgtcaatttt

SEQ ID NO: 465 - DNA, 501 bp, Limnipivirus C
gtttctgagcactggtaagagcttagacaaacgtttttaaaatttattttctctgcaacttttgtttgtgtttatttttatttgttaattttgcgcctaagcatttgttgcgaagtatttgattcattagtaatattacttattgtttatttagatggtattcaaagtggtgggagtatcgaacccaagcgtcgtatgctatctccttgaacaatttttaatcattgcgaagtgatcattgaaaaggataggtgtttaagaactcaaagagtgttaataatgttgggtgacaggtgtccccatagaatttattaacatgatttggactggttatctagtaagaagaaccatcgaacgcacgagcgagcattgcttgcggggcagttaccctgcgtcgatgtaagtgtgtaccggggggtgcacatgttgattctttatggcctgatagggtgcgtcattcgcgcctagataattagtataatgcgaatggaataaatttac

SEQ ID NO: 466 - DNA, 675 bp, Orivirus sp.
ggtcccaggccaatattcttcgtaaggcttggttccaattttccaccactcgtgtttgggttctggcctatggtacccagaggggcggtttgggggaattaactccccctcccctgtggtcctataccaccccacacctctgtgggctttctttactatcttcttgttttccgacttttaaacactaggcaggcgcgcctagtcatacaccgcccggctggtctttccagctcttgtgggcggtgcgcgctggtccatcgtgcccagcgacatagcaccttgtggacacctccgaacgccctcccctgtatggggtggtgcccaggggtttcagtgtggtgacacactccctggggcccgaaaggctagtgtgcaacaggtgaggtacagccagctgcccccgtggctggagggaccaagcttgtgaagcacacctcaccttcttgggggtgggctagtaagtggtgaaagcatagtgtccgtgtcgctggccaacactttgggtcaagtccagccactcagtgagtagatgcccaggaggtacccctagtggatctgacttggggcctgttacttaatgcaggttaaaaactatgaaagctgagtagtgtagcccggctggtggcttctcttccttattcattctattttatggtgacaaacgcaactgaagcc

SEQ ID NO: 467 - DNA, 675 bp, Hepatovirus A
cttgatacctcaccgccgtttgcctaggctataggctaaatttccctttccctgtcctttccctatttccttttgttttgtttgtaaatattaattcctgcaggttcagggttctttaatctgtttctctataagaacactcaattttcacgctttctgtctcctttcttccagggctctccccttgccctaggctctggccgttgcgcccggcggggtcaactccatgattagcatggagctgtaggagtctaaattggggacgcagatgtttgggacgtcgccttgcagtgttaacttggctttcatgaacctctttgatcttccacaaggggtaggctacgggtgaaacctcttaggctaatacttctatgaagagatgccttggatagggtaacagcggcggatattggtgagttgttaagacaaaaaccattcaacgccgaaggactggctctcatccagtggatgcattgagggaattgattgtcagggctgtctctaggtttaatctcagacctctctgtgcttagggcaaacactatttggccttaaatgggatcctgtgagagggggtccctccattgacagctggactgttctttggggccttatgtggtgtttgcctctgaggtactcaggggcatttaggtttttcctcattcttaaacaata

SEQ ID NO: 468 - DNA, 675 bp, Hepatovirus A
cgccgtttgcctaggctataggctaaattttccctttcccttttccctttcctattccctttgttttgcttgtaaatattgatttgtaaatattgattcctgcaggttcagggttcttaaatctgtttctctataagaacactcatttcacgctttctgtcttctttcttccagggctctccccttgccctaggctctggccgttgcgcccggcggggtcaactccatgattagcatggagctgtaggagtctaaattggggacacagatgtttggaacgtcaccttgcagtgttaacttggctttcatgaatctctttgatcttccacaaggggtaggctacgggtgaaacctcttaggctaatacttctatgaagagatgccttggatagggtaacagcggcggatattggtgagttgttaagacaaaaaccattcaacgccggaggactgactctcatccagtggatgcattgagtggattgactgtcggggctgtctttaggcttaattccagacctctctgtgcttggggcaaacatcatttggccttaaatgggattctgtgagaggggatccctccattgccagctggactgttctttggggccttatgtggtgtttgccgctgaggtactcaggggcatttaggtttttcctcattcttaaataata

SEQ ID NO: 469 - DNA, 519 bp, Parechovirus F
ggtcggggagatgtgttcatgatcggttaacaccatcatggatcatctctccccgacctctttttgacccagctatgggttaaatagtacttttcttttctcttttgctttcttttgtgttttgtttgttttgcaacatataacaagcattttatcagtattagtgtctgcaactgtataacaagcaaggtggagcaatcatgcgagtatatctcaattgaattgtgacacacaagtgtgcactatgtggaataaatgccattttggccaaacctggttagccagaccagtagtaggacaatttggcacccttagtgggcgcgacctagatgctagggatgagcaaacctatttcccctgagtacaggggctctccttcacctctacattttggacctctttttgagtatcctcgatagaaggtgaagtgacggtgtaccggatggttaattgatctcattgctgggtgacagcccgctaggaccaggcagcatctttgtatggacctgtacatgtaac

SEQ ID NO: 470 - DNA, 343 bp, Parechovirus D
acatggggcaggtgtgctgtgccaagagcaacactacggtggccgagccgatggttcgtcaccacgtagtaggactccgtagtgcttggttacggcggacgtaagtcagttgagtgatgtctaagtggcaaaccatgagtacatggtaaccttgtgtggactcgcgggacggaatttcctatcccattgactccttgtagcaaggtgggtatacccaaccacaatggcagcaccctgggtgggaacccaggggcctggattagtatccagtcacacagcctgatagggtggcggctcagccactgaccagcgtctctaaataattgtgagctgttcatgcacc

SEQ ID NO: 471 - DNA, 675 bp, Parechovirus C
cggtcatccccctttccccacagccggtgtgggttctaatcggctcctactaaacacctaagcatcactgcgcctctatctctcctatccacaggtctaagacgcttggaataagacatgtgggtgcaataggaagattagctagtccaatctctccttccagctacgcttctcccttcgatgagcgtagggggggcccccacctccctcatctctggatagggctcttgctacggggctttcccgtctggaccagcaggcccactggtgcgcttccattcaagtttagtgtgcattactgtctgaaatattgctttgctaggatctagtgtagcgacctgcatattgccagcggacttccccacatggtaacatgtgcctctgggcccaaaaggcatgtctttgaccgtatgcagtacaaccccagtataggtcctttctatggcagtatggatctcagtgatgagtctatacagaatatggaagtggttcggatatgtcagcccgaaggatgcccagaaggtacccgcagataaccttaagagactgtggatctgatctggggcccaccaccttcgggtgggtagaagctaaccatgccttgggttaaaaaacgtctaagggctgaccagacccgggggatccgggttttccctatcttgacctactctaatc

SEQ ID NO: 472 - DNA, 675 bp, Unknown
  Description of Unknown: Ljungan Virus 87-012 sequence
ctcattgcccacacctggttggttcccaggttcatacaataaccatcaataaacttttaacatctaagatagtattatcccatactagactggacgaagccgcttggaataagtctagtcttatcttgtatgtgtcctgcactgaacttgtttctgtctctggagtgctctacacttcagtaggggctgtacccgggcggtcccactcttcacaggaatctgcacaggtggctttcacctctggacagtgcattccacacccgctccacggtagaagatgatgtgtgtctttgcttgtgaaaagcttgtgaaaatcgtgtgtaggcgtagcggctacttgagtgccagcggattacccctagtggtaacactagcctctgggcccaaaaggcatgtcatttgaccactcaggtacacaaccccagtgatgcacacgcttagtaatggcttagtaacaaacattgattgatcatttgaaagctgttaggaggtttaggtatgacgggctgaaggatgccctgaaggtacccataggtaaccttaagcgactatggatctgatcaggggcccaccatgtaacacatgggtagaagtcttcggaccttgggttaaaaaacgtctaggcccgccccccacagggatgtggggtttcccttataaccccaatattgtata

SEQ ID NO: 473 - DNA, 675 bp, Parechovirus sp.
gccgtcgggccttacaccccgacttgctgagtttctctaggagagtccctttcccagccagaggtggctggtcaaacaataccaaacgtaactaaacatctaagataacatagccctatgcctggtctccaccagttgaaggcatcttgcaataaaatgggtggattaagacgcttaaagcatggagtcaattatcttttctaactagtgatcttcactgggtggcagatggcgtgccataactctattagtgggataccacgctcgtggatcttatgcccacacagccatcctctagtaagtttgcaaggtgtctgatgaggcgtgggaacttattggaaataattacttgctgcgaagcatcctactgccagcggatcaacacctggtaacaggtgcccctggggccaaaagccacggtttaacagaccctttaggattggttaaaacctgagtaattatggaagatacttagtacctaccaacttggtaacagtgcaaacactagttgtaaggcccacgaaggatgcccagaaggtacccgcaggtaacaagagacactgtggatctgatctggggccacctacctctatcctggtgaggtggttaaaaaacgtctagtgggccaaacccaggggggatccctggtttccttattttagtgtaaatgtcatt

SEQ ID NO: 474 - DNA, 631 bp, Parechovirus sp.
agagtccttttcccagccagaggtggctggttaaataatacctactgtaacaaaacatctaagatgtaacaaccacacacctggtctccactggccgaaggcaactagcaataaggcaggtgggttcagacgcttaaagtgtgttgtacatattcttttctaacctgtgttttacacagggtggcagatggcgtgccataactctaacagtgagataccacgcttgtggaccttatgctcacacagccatcctctagtaagtttgtaagatgtctgatgacgtgtgggaacctgttggagataacagtttgctgcaaagcatcccactgccagcggatctacatctggtaacagatgcctctggggccaaaagccaaggtttaacagaccctttgggattggttcaaacctgaactgttatggaagacatttagtacctgctgatttggtagtaatgcaaacactagttgtaaggcccacgaaggatgcccagaaggtacccgtaggtaacaagtggcactatggatctgatctggggccagctacctctatcttggtgagttggttaaaaaacgtctagtgggccaaacccaggggggatcctggtttctttttaatttaagtaatcact

SEQ ID NO: 475 - DNA, 675 bp, Parechovirus sp.
gggccttataccccgacttgctgagtttctctaggagagtccctttcccagccctgaggcggctggataataaaggcctcacatgtaacaaacatctaagacaaaataatttgccttgcacctggtccccactagttgaaggcatctagcaataagatgagtggaacaaggacgcttaaagtgcaatgatagttatcttttctaacccactatttatagtggggtggtggatggcgcaccataattctaatagtgagataccacgcttgtggaccttatgctcacacagccatcctctagtaagtttgtgagacgtctggtgacgtgtgggaacttactggaaacaatgctttgccgtaaggctttcattagccagcggaccaccacctggtaacaggtgcctctggggccaaaagccaaggtttaatagaccctaatggaatggttcaaacctggagcattgtggaaagtacttagtacctgctgatctggtagtaatgcaaacactagttgtacggcccacgaaggatgcccagaaggtacccgtaggtaacaagtgacactatggatctgatctggggccaactacctctatcttggtgagttggttaaaaaacgtctagtgggccaaacccaggggggatccctggtttccttttattttactttgtcaat

SEQ ID NO: 476 - DNA, 433 bp, Parechovirus sp.
ctctattagtgagataccacgcttgtggaccttatgctcacacagccatcctctagtaagtttgtaagacgtctggtgacgtgtgggaacttgtgggaatcaatattttgctttaaagcatccattagccagcggataaaacacctggtaacaggtgcctctggggccaaaagccaaggtttaacagaccctagtggattggtttcaaaacctgaaatattgtggaacacactcagtacctactgatctggtagtaatgcaagcactagttgtaaggcccacgaaggatgcccagaaggtacctgtagggaacaagagacactatagatctgatctggggctggctacctctattttggtgagtcagttaaaaaacgtctagtgggccaaacccaggggggaccctggtttccatttattttacaaaggcact

SEQ ID NO: 477 - DNA, 488 bp, Potamipivirus A
cacatggaaagcttttcgcttccatgtttacgcacacactctctttgacaccctgttgtatggtgttaaactacaacatttgtctgtctataatcgtttattttgtttaccctatatgtacccaagtatttgattgcttgactcacataagcatcggtaacccatactgttttatgagctactacctctgctgtctacatacattttatatgaatggtttgagctctgcctcaggatcaaacatggtaacatgttcctttggtcagttagaatcttattgtataatctaaggtgtctattagtacgtagaaagttgtaacacatatggggcctgatagccgctatctctgatggatgtaaggtaaccttctttaggtctgatacattctgcacaggatccaattttcggtgccctgtacgagtgcactcttatgcacgaggacgagatatgctacaacccactgcaaatttaaacccaaactttaaca

SEQ ID NO: 478 - DNA, 675 bp, Potamipivirus B
tttcaacgtcgtggctgacgttaaaaagccacaattccacttaccttttaccttttatgtttaatgtttgttagttttgtgatctttaacaaatagatctaaataatttgttggtaaccaatctcggatgtttcggctgcattgtagtttatttatttcattttagttgtaggtggccactacgtcctggaatcatacatggtaacatgtacctcggcggttatccactattacgctaatctaagaatatttaaatgaaaatgtaagtgttacggctgactttgggcctgatagttaaatgctcgcactgacagatagtaccctcctttaggatcgattctgttacatgggatccattttggtgccccactgattcaacctctttgttgaaaaagagttagcatactacaaattttccaaacaaaaaccctttttaatgactacaacttatgattttatgaattttactgctcttgaaaaagatattttgacattgatcgctgtactgtttcagacattcattgcatccatttttgttggctactcctcacaaactcaaaacttttccacacgagaaaccttgtttattgaattttgcctttatattttggaacttgttgttggatttattgtttgcttaattattgacctcacacctgttttaaacactacaat

SEQ ID NO: 479 - DNA, 546 bp, Unknown
  Description of Unknown: Beihai Conger Picornavirus sequence
gggacaaccccacagctggtacaaccattgtgggttggtctccaccctttttcaaccgtggcaacttcggttaaagttgcaaatcccccctctccctattccacctcccttactttcactccccatatatggtcccagattttattctacctctttatatttttatttagtacagtggtggtgaattactcccagcataaactttgctggatcagtgttcatcaagcatactaattactaatgtactgagctatactattatctggcatctcacctggataaccggtgtgaccatatttcctaggttgcctccctatgtattttgtagcacctgtgcatctgcacgttggggcgacaaattgtaggtttcctggcacgggtaagaattgtggaaagctagtatgcagttaatgcaagggcgcgtttttcgctaccccgacactgctaaagtttttgggaggggtcccttaaacatttctagtattgagtgatagctttgcggcaggtcaccacaaccttactataaataaacctgttgaatctcac

SEQ ID NO: 480 - DNA, 457 bp, Sapelovirus sp.
tacgcatgtattccacactcatttcccccctccacccttaaggtggttgtatccccataccttaccctcccttccacaatggacggacaaatggatttgacctcacggcaaacacatatggtatgatttcggatacaccttaacggcagtagcgtggcgagctatggaaaaatcgcaattgtcgatagccatgttagtgacgcgcttcggcgtgctcctttggtgattcggcgactggttacaggagagtaggcagtgagctatgggcaaacctctacagtattacttagagggaatgtgcaattgagacttgacgagcgtctcctcggagatgtggcgcatgctcttggcattaccatagtgagcttccaggttgggaaacctggactgggcctatactacctgatagggtcgcggctggccgcctgtaactagtatagtcagttgaaaccccccc

SEQ ID NO: 481 - DNA, 489 bp, Sapelovirus sp.
ttgaaatgggtgtggggtacatgcgtattacggtacgcatatattccacactcatttccccccctccacccttaaggtggttgtatccccataccttaccctcccttctaaaacagatggacaaatggatttgaacttatggcaagtgaatatggtatgactttggatacactttaacggcagtagcgtggcgagctatggaaaaatcgcaattgtcgatagccatgttagtgacgcgcttcggcgtgctcctttggtgattcggcgactggttacaggagagtaggcagtgagctatgggcaaacctctacagtattacttagagggaatgtgcaattgagacttgacgagcgtctcttagagatgtggcgcatgctcttggcattaccatagtgagcttccaggttgggaaacctggactgggcctatactacctgatagggtcgcggctggccgcctgtaactagtatagtcagttgaaacccccc

SEQ ID NO: 482 - DNA, 675 bp, Sapelovirus sp.
ccaaggatctgttgcataggcgttgtatcccctaaccttttacctacccatcccaataggactggtatttcggttttgattgagtaatggatactgattctatacctgttacccattcaggggaaaaatggagtttctttcatggatctgacttgatatgaccaagagtcaacactttgcgtgttggccgtatggaatgctttaaggtttattctttggattatgacttcagggttggccgcccaggataaaaggcaattgtggtaagtgatgttagtcattggtggttgaaacctgcctaagacgtcctaggtctacgctgtgcgggccgaagtaagcttaggaataacagggagtatgccattttctgctttcacccaacacgaccgtacacgaaagagctagaggcactttggggcaaagggaaaagctttgcttagcccgaatgttcatttgagtccttgacgaatgcgtcccgtctgtcccgacggtgaggcgtatggcgcatgctcatggcattacccaatggtgtatctgtgaggggggggctcctcacacttagtctagtgctacctgacagggccgcggctggtcgtttgtgtatggtataaccagtagtaatcccccatggattgctttaacttcccctcctcccttaccaagacattctctaag

SEQ ID NO: 483 - DNA, 579 bp, Sapelovirus sp.
ttttaacttgttatgacattcaaggaaaaaatgtctttttcattatgggactgacctgtttatgaacatgagcagcggcactgctccacgggctatccgtgtaagaaatattgattattcttatggatcatgatttcagggttggccgcccagtctaaaaggcaattgtggtaagctatgtaagtagttggctgttgaaaggagccaagtacatcctaggtctacgctgtgcgggccgaagtaagacttggaacaactctgagtaggcagtttttctctttagcccaacacgaccgcatactgaagagctagaggcactttggggcaaaggtaaaagcattgcttagaccgaatgttcaatgagaccttgacgagtgctgtcacagtgtcccctgatggcagtatggcgcatgctcttggcattacccatatgtgtatctatagggggggggccccctatacttagtctagtgctacctgacagggccgcggctggtcgtcggtgtgtggtataaccagtagtaatcccccatggattgctttaactccccctcctccctcaacaaaactttctctaag

SEQ ID NO: 484 - DNA, 522 bp, Rabovirus C
ccgggtataacccggagttttggggcaggtccaagccccacataggaacatacgatccacggatcgtgtgttcttttatgctttctaaccttaccctttgtaaccattacgctttacgccgcatggtgtttggcggcaccatgacgtggacaagaggttacgccattacgatatgtaccctccccttttggggagagaccgaccaattatggtacagtatccaactgtattgtggtcaagtacttctgtttccccggtgatgcgggataggctgtacccacggccaaaacctgctgatccgttacccgactcacatctacgaggaggctagtaaaaggcatgaagttcaagagtatgatccaaccagatccccactggtaaactagtgatgagggttcccgttccgaacatggcaacatgtgggttccctgcgttggcactaggccccttccgaggggtgctctgaagatggattgttgatgaagaccaatttgtgcatgtgtttatcctccggccctctga

SEQ ID NO: 485 - DNA, 551 bp, Rabovirus A
ccgaccccactggtcgaaggccacttggcaataagactggtggaacaaggtcgcctgtagttgattggaaccttctttctaatgacttatgtcagcggtgctactcacaccgtaactctcctaccctatccccacgcttgtggaactaggaggggatgagtgattcaagtaagtactgtcagaatggtgaaaataatctgattctgaaacgctatggatccatcgaaagatggggctacacgcctgcggaacaacacatggtaacatgtgccccaggggccgaaagccacggtgataggatcacccgtgtagtttgagatcatatcaatgttcatagtctagtaagatgatttgaaatctaactggtctgatggctaactgcttgtcttattgcggcctaaggatgtcctgcaggtacctttagagaaccttaagagactattgatctgagcaggagccaaggtggtctttcccagccttggttaaaaagcgtctaagccgcggcagggggcgggaggccccctttcctcccaaactataatatagattgt

SEQ ID NO: 486 - DNA, 675 bp, Parabovirus C
gatgtatccccatcccccagtgtgtatgccatactgcatagctcgcctatgccctatggattcacaaccctttcatataccctccctacccaaccccgtaaccacatgctttactccgcttggggttttgcggccccatgttgtgacgaaatggctacgcaatcaatgcggctaatggggcctgccgcttttaagtggccccagttagaagtttatgcacacccgcccattaggaggccaccagccaggtggtcagagggcaagcacttctgtttccccggtgaagtttgataagctgtgcccacggctgaagcagacagatccgttacccgcctcactactacgagacggctagtagtgtgtaatatccgaatttcattgatccgggtgttccccccacccagaaacgtgtgatgaggagcggcacccctcctatggcaacatagggcctctcctgcgctggcacacgggctctatgagcatgaaatcaggagaaagtcacacgaagaccttattgtgctagtgttgattcctccgcccccctgaatgcggctaatcccaactccggagcgcccgctggcaaacccgccagaagagcgtcgtaatgcgtaagtctggagcggaaccgactactttgggtgtggcgtgtttcctttatttcctttgtatttgtat

SEQ ID NO: 487 - DNA, 675 bp, Parabovirus B
aacccataatccattgtccatcaatgttttatgggggggaccctttctcccctccccctccaaataccttttacccctctgtaaccaagagtgtgcaaaatctatttactagcccagaattgcggcttctggggaggtttattcctcatgcctaacaagatgttacgcaaactccgggctacggccctgggcttttgccctaaagatttagaagtttacactatcgtccaacaggaggacaacaaaccagttgttctaaggacaagcacttctgtttccccggtgagactggatagactgtacccacggttgaaactggttgatccgttacccgactcactacttcgagaagattagtaggaaactgtgaaactgattccattgatccggatactttccccgtatccagaaactactgatgagggttgacttcccgactacggcgacgtagtgtcatccctgcgctggcagtaggcctctttgaggatggaagatgtggatcggtaaccgaaggtcctattgagctagtgtttatacctccggcctcctgaatgcggctaatcctaacccatgatctagtgctcacaaaccagtgagtagctagtcgtaacgcgtaagtcgtgggcggaaccgactactttggagtgaccgtgtttcctattttacttttgtttg

SEQ ID NO: 488 - DNA, 675 bp, Parabovirus sp.
accgttacgcaccactcagttggtgtttggtggcaccaatgatggaacaaaaggctacaccacttgggctacggcccgcgccaccttgtggcgcaaagacattagaagaatagcataccgcccactagggccctgcagccagcagggtaacgggcaagcacttctgtctccccggtagaacggtataggctgtacccacggccgaaaactgaactatcgttacccgactccgtacttcgcaaagcttagtaggaaactggaaagttcgagttattgacccggagtgttccccccactccagaaacgcgtgatgagggttgccaccccgaccatggcgacatggtgggcatccctgcgctggcacgcggcctctaagaggataactcgctcctactggtaaccgaagagccccgtgagctacggtttattcctccgcctccctgaatgcggctaatcctaacccatgagcagttgccatagatccatatggtggactgtcgtaacgcgtaagttgtgggcggaaccgactactttgggatggcgtgtttccttgttttctccatttgttgttgtatggtgacaagttatagatctcgatctatagcgtttcttgagagatttccaaacatttattcaagtcgtacaattcttgtgtttaagcagtacagtgtaagg

SEQ ID NO: 489 - DNA, 316 bp, Felipivirus sp.
gatgtcggatgacggctggccaccggggaaaaacggcaaatgtgcaccacctctgcaacccacgccgaccacgtttaaccatggcgttagtaggagtggaccactgcagtgggctctggtgtgcgacagtcagtggtagagtagacagtcctgactgggcaatgggaccgcgttgcgtatccctaggtggcatcgagattcctctgctacccaccagcgtggactcctatggggggggccccataggctaggtctatactgcctgatagggtcgcggctggtcgaccactgactgtataaccagttgtaactcact

SEQ ID NO: 490 - DNA, 553 bp, Boosepivirus A
ttgaaagacctcggcatatatcgttgtcacaacggtatatgtcgagatctttctccccaccccctccaattcccttttccccctcttgcaacttagaagtttgtacacacagggcaataggatacgtgatccagccaggacacgtgagctcaagcacttctgtttccccgtccccttcacgtactacgggaatgttagtaatttgtgtgcactttagtaaggttgatccgggattaaccccaaatcccagaaactggtgatgagcgttaccacccccgccgggcgaccggaaggtttcgctgcgttggcaccagggcttcggcaccagaaaaaggtaaagcaaatgaaggcgctactgtgctacgagaagtttcctccaggcccctgaatgcggctaatcctaaccagtgatccaccggtgcaaaaccatgtactaggtggtcgtaacgcgcaagtcgctggcggaaccgactactttgggtgtcctgtgtttccatattttattttattcaattttatggtgacaagagtaaagagatacagatttgcagcc

SEQ ID NO: 491 - DNA, 512 bp, Boosepivirus B
ttttctcccctccccctccaactaccttttccccctcttgtaacgctagaagtttgtgcaaaccgcctgtagggtactgcaatccagcagtgcataggctaagcttttcttgttaccccaccccacattatactgaggaggattgtgaaattgtgttagtatgggttagtagcggtgacccgggtaaccccaacccagaaactcacggatgagatgaacaggaccccacatggtaacgtgtgtgttcgtctgccccgcaaggtgaggccgtgagagctttgcacgcgaaaaccttgaaaacccaaaagtaccttgagctcttcgctattttgtgtttcctccaggaccctgaatgcggctaaacctaacccgcgatccgcacgtagcaacccagctagagtgtggtcgtaatgcgcaagttgcgggcggtaccgactactttggtgttcctgtgtttcctttattttattttgaatttttatggtgacaacagctagaaaataagagtgaac

SEQ ID NO: 492 - DNA, 506 bp, Unknown
  Description of Unknown: Phacovirus Pf-CHK1 sequence
gtgtgtcatttctcccctccccctcccaaaccttttccccctctaatcggattgattaacccggttaaagatgattaatggtttgtgagttgatatgatggcccggcattgaatccgggaattcttaagtaatggaattgcatccaatatgaaagtgagtgtggcaagctcacaagtagtacttggctctgcccattatttgaggaccaactcttcttgactacaatgtgtttaaagtaaactggaccacattgtgtatccagacaactccatttgataatgtacgctggaaacgttttcagtgcatagggtcctaaagtggtgctgaaatattgcaagctcaatgggatactgaacgctgaaaaccgccgctgttatcatatgggcccctagtgggtaaatgttggctttaggcatatactgcttgggaatgcagtactggttgtagacagggtgatagcctaccggctggcgtagttgagttggtatagccagttgattgccat

SEQ ID NO: 493 - DNA, 612 bp, Rhinovirus sp.
ttaaagctggatcatggttgttcccaccatgattacccacgcggtgcagtggtcttgtattacggtacatttccataccagttttatacaccccaccccgaaactcatagaagtttgtacacaatgaccaataggtggtggccatccaggtcgctaatggtcaagcacttctgtttccccggcacccttgtatacgcttcacccgaggcgaaaaatgaggttgtcgttatccgcaaagtgcctacgaaaagcctagtaacactttgaaaacccatggttggtcgctcagctgtttacccaacagtagacctggcagatgaggctagacattccccaccagcgatggtggtctagcctgcgtggctgcctgcacaccctgccgggtgtgaagccagaaagtggacaaggtgtgaagagcctattgtgctcactttgagtcctccggcccctgaatgtggctaaccctaaccccgtagctgttgcatgtaacccaacatgtatgcagtcgtaatgggcaactatgggatgggaccaactactttgggtgtccgtgtttcctgttttactttttcattgcttatggtgacaattgtatctgatacacttgttacc

SEQ ID NO: 494 - DNA, 627 bp, Rhinovirus sp.
ttaaaacagcggatgggtatcccaccatccgacccacagggtgtagtgctctggtattttgtacctttgcacgcctgtttccccattgtacccctccttaaatttcctccccaagtaacgttagaagtttaaggaaacaaatgtacaataggaagcatcacatccagtggtgttatgtacaagcacttctgtttccccggagcgaggtataagtggtacccaccgccgaaagcctttaaccgttatccgccaatcaactacgtaatggctagtattaccatgtttgtgacttggtgttcgatcaggtggttccccccactagtttggtcgatgaggctaggaactccccacgggtgaccgtgtcctagcctgcgtggcggccaacccagcttttgctgggacgcctttttacagacatggtgtgaagacctgcatgtgcttgattgtgagtcctccggcccctgaatgcggctaaccttaaccccggagccttgcaacataatccaatgttgttgaggtcgtaatgagtaattctgggatgggaccgactactttgggtgtccgtgtttccttttattctttatattgtcttatggtcacagcatatatagcatatatactgtgatc

SEQ ID NO: 495 - DNA, 615 bp, Rhinovirus sp.
ttaaaactgggtttgggttgttcccacccaaaccacccacgcggtgttgtacactgttattccggtaaccttgtacgccagttttatatcccttcccccccttgtaacttagaagacatgcgaatcgaccaatagcaggcaatcaaccagattgtcaccggtcaagcacttctgtttccccggctctcgttgatatgctccaacagggcaaaaacaattggagtcgttacccgcaagatgcctacgcaaaacctagtagcatcttcgaagatttttggttggtcgctcagttgctaccccagcaatagacctggcagatgaggctagaaataccccactggtgacagtgttctagcctgcgtggctgcctgcacacccacacgggtgtgaagccaaagattggacaaggtgtgaagagtcacgtgtgctcatcttgagtcctccggcccctgaatgcggctaaccttaaccccgtagccattgctcgcaatccagcgagtatatggtcgtaatgagtaattacgggatgggaccgactactttgggtgtccgtgtttcactttttacttatcaatttgcttatggtgacaatatatatagatatatattgacacc

SEQ ID NO: 496 - DNA, 660 bp, Enterovirus L
acatgggccagcccaccacacccactgggtgtagtagtctggttctatggaacctttctacgcctcttttgcttccctcccccatttctccttcgattgctccacctgtgatctttgcaacttagaagaaataatgaacccgcacaatagcgggcgctgagccacagcgtcaatgtgcaagcacttctgtttccccggaatgggcccataggctgtacccacggctgaaagggaccggcccgttacccgccttggtactgcgagaatgttagtaactccctcgatagctttaggcgttacgctcagccctttgagcccgaagggtagttcgggtcgatgaggctcgtcattccccactggcgacagtgtgacttgcctgcgttggcggcccggggtggggggcaacccccatccacgcctactgaaggacagggtgtgaaggcgctattgcgctactaaggagtcctccggcccctgaatgcggctaacccgaaccccgagcccacggtggtaaacccgccacaagtgggtcgtaatgagtaatttggggcagggaccgactactttgggtgtccgtgtttcctgtttttccatacgatggctgcttatggtgacaaccataagcaattggattggccatccggtgttcatattgcgaat

SEQ ID NO: 497 - DNA, 675 bp, Enterovirus K
tcagcctgacgcaagtgcctccattggagtctctccaagccctccggggcttggagggcgccgaccccctgcctagggggagcccacgacacggctggagtccattggcacaccgcagccacgattcaagccagaattgaaagcgggaagcacttctgtctccccggtgtggatcatacgctgtacccacggcgaaaagtgaagcatcgttacccgactcggtacttcgagaagcccagtacagttgtggatctctgcagggtatacgctcagcgtgacccctacgtagttccttgagatggctgagagaacaccccacgggcgaccgtgtctctcggcgcgtggctcaaggccgggccttcagtggctcggtgccttgcagagtgaagcctccgaacagcctattgagctaccgtttagcctccgccctcttgaatgcggctaatcctaaccatggagcgcccgcccacagtccagtgggtagagcgtcgtaacgcgcaagtccgtggcggaaccgactactttagagtggcgtgtttccaatttatcctttataaagttgcttatggtgacaccacaagagatccacgatttcttgtttcttatcactgagacacaagtcatattcatcaatctttattgcggaattaacttggtgcgtccaaacacatcagc

SEQ ID NO: 498 - DNA, 675 bp, Enterovirus sp.
caccctgagggcccacgtggcgtagtactctggtatcaaggtacctttgtacgcctattttatttcccttcccccacagtaacttagaagcttatctcatagttcaacagtagggtcactaaccaagtggctcagcgaacaagcacttctgtttccccggtcctagtacctgtgaagctgtacccacggcggaaggggaaaaagatcgttatccggccccctacttcggaaagcctagtaacaccattgaagcaatcgagtgttgcgctcagcacagtaacccctgtgtagctttggttgatgagtctgggcactccccactggcgacagcggcccaggctgcgttggcggccaaccgactcgggcaaccgggtcggacgctcgtttgtggacatggtgtgaagagcctactgagctagagggtagtcctccggcccctgaatgcggataatcctaaccccggagcacccacactcaatccagagtgcaggatgtcgtaacgcgtaagtctgggacggaaccgactactttgggtgtccgtgtttcctgttttacttactttggctgcttatggtgacaatctagtgttgttaccatatagctattggattggccatccggtgttttgaattgtgtgtttatactaattcttttacatatcacagacaaccaaat

SEQ ID NO: 499 - DNA, 675 bp, Enterovirus sp.
cggtacctttgtacgcctattttacccccttccccttgtaacttagaagcaaagcaaaccagttcaatagtaagcaacacaacccagtgttgtgacgaacaagtacttctgtttccccgggagggtctgacggtaagctgtacccacggctgaagtatgacctaccgttaaccggctacctacttcgagaagtctagtaataccattgaagttttgttggcgttacgctcaacacactaccccgtgtgtagttttggctgatgagtcacggcattccccacgggcgaccgtggccgtggctgcgttgcggccaaccaaggggcgcaagctccttggacgtcacttaacagacatggtgtgaagaacctattgagctaggtagtagtcctccggcccctgaatgcggctaatcctaactccggagcacatcagtgcaacccagcatttggtgtgttgtaatacgcaagtctggagcggaaccgactactttgggtgtccgtgtttcctgttttaccttatttggctgcttatggtgacaatttgatattgttaccatatagctgttggattggccatccggatttttgaaagagacccaaaactttcttctctacttcagattcaagtgcgaagttttccttttcatatattacttactaatttgaagtaccaaag

SEQ ID NO: 500 - DNA, 675 bp, Enterovirus I
ttagtactttctcacggggatagtggtatccctccctagtaatttagaagacttgaaaaaccgaccaataggcacctcgcatccagcggggtaaaggtcaagcacttctgtttccccgggtcgagtagcgatagactgtgcccacggtcgaaggtgaaacaacccgttatccgactttgtacttcgggaagcctagtaccaccaaagattatgcttggggtttcgctcagcacgaccctggtgtagatcaggccgatggatcaccgcattcctcacaggcgactgtggcggtggtcgcgtggcagcctgccgatggggcaacccatcggacgccaagcatatgacagggtgtgaagagcctactgagctacaaagtattcctccggcccctgaatgcggctaatcccaaccacggagcatttgctaccaaaccaggtagtggaatgtcgtaacgggtaactctgtggcggaaccgactactttgggtgtccgtgtttccttttaatttatcattctgtatatggtgacaactatagtgctatctcgatttgcattactattgttgagattaaaactttattacattgttgcattttaccctttgagtgagttttcacctgaacagattaatttactcatcctgtttatatattacaagcagaaatacttgcaaag

SEQ ID NO: 501 - DNA, 675 bp, Enterovirus sp.
gcaatgctgcaccagtgcactggtacgctagtaccttttcacggagtagatggtatcccttaccccggaacctagaagattgcacacaaaccgaccaataggcgcaccgcatccagccgtgcagcggtcaagcacttctgtctccccggtctgtaaagatcgttatccgcccgacccactacgaaaagcctagtaactggccaagtgaacgcgaagttgcgctccgccacaaccccagtggtagctctggaagatggggctcgcaccacccccgtggtaacacggttgcctgcccgcgtgtgcttccgggttcggtctcgtgccgttcacttcaacttcacgcaaccagccaagagcctattgtgctgggacggttttcctccggggccgtgaatgctgctaatcccaacctccgagcgtgtgcgcacaatccagtgttgctacgtcgtaacgcgtaagttggaggcggaacagactactttcggtaccccgtgtttcctctcattttatttaatattttatggtgacaattgttgagatttgcgctcttgcaacgttgccattgaatattggcttatactatttggttgccttttacaaaacctctgatatacccagttcttacattgatctgcttgtttttctcaatttgaagtatagactacaaatagcaaa

SEQ ID NO: 502 - DNA, 675 bp, Enterovirus sp.
cgtggcggccagtactctggtatcacggtacctttgtacgcctgttttatatccccttcccccgcaacttagaagaaaacaaatcaagttcactaggagggggtacaaaccagtaccaccacgaacaagcacttctgtttccccggtgatgtcgtatagactgtaaccacggttgaaaacgattgatccgttatccgctcttgtacttcgaaaagcccagtatcaccttggaatcttcgatgcgttgcgctcagcactcaaccccagagtgtagcttaggtcgatgagtctggacactcctcaccggcgacggtggtccaggctgcgttggcggcctacctgtggtccaaagccacaggacgctagttgtgaacaaggtgtgaagagcctattgagctacaagagaatcctccggcccctgaatgcggctaatcctaaccacggagcaagggtacacaaaccagtgtatatcttgtcgtaacgcgcaagtctgtggcggaaccgactactttgggtgtccgtgtttccttttgtttttatcatggctgcttatggtgacaatctaagattgttatcatatagctgttggattggccatccggtaatttattgagatttgagcatttgcttgtttcttcaacaatttcacctattcattgcatttcagcagtcaaa

SEQ ID NO: 503 - DNA, 675 bp, Unknown
  Description of Unknown: PV3 sequence
tacctttgtacgcctgttttatactccctcccccgcaacttagaagcatacaattcaagctcaataggagggggtgcaagccagcgcctccgtgggcaagcactactgtttccccggtgaggccgcatagactgttcccacggttgaaagtggccgatccgttatccgctcatgtacttcgagaagcctagtatcgctctggaatcttcgacgcgttgcgctcagcactcaaccccggagtgtagcttgggccgatgagtctggacagtccccactggcgacagtggtccaggctgcgctggcggcccacctgtggcccaaagccacgggacgctagttgtgaacagggtgtgaagagcctattgagctacatgagagtcctccggcccctgaatgcggctaatcctaaccatggagcaggcagctgcaacccagcagccagcctgtcgtaacgcgcaagtccgtggcggaaccgactactttgggtgtccgtgtttccttttattcttgaatggctgcttatggtgacaatcatagattgttatcataaagcgagttggattggccatccagtgtgaatcagattaattactcccttgtttgttggatccactcccgaaacgttttactccttaacttattgaaattgtttgaagacaggatttcagtgtcaca

SEQ ID NO: 504 - DNA, 675 bp, Enterovirus sp.
ctttgtacgcctgttttacatcccctcccccacgtaactttagaagcaattcaacaagttcaatagagggggtacaaaccagtatcaccacgaacaagcacttctgtttccccggtgattttacataagctgtgcccacggctgaaagtgaatgatccgttacccgctcgagtacttcgaaaagcctagtatcgctttgggatcttcgacgcgttgcgctcagcactctaccccgagtgtagcttaggctgatgagtctgggcattccccatcggcgacgatggcccaggctgcgttggcggcctacccatggctaacgccatgggacgctagttgtgaacaaggtgtgaagagcctattgagctactcgagagtcctccggcccctgaatgcggctaatcccaaccacggatcaggtgcctccaacccaggaggtggcctgtcgtaacgcgcaagtctgtggcggaaccgactactttgggtgtccgtgtttccttttatcttttaaatggctgcttatggtgacaatcatagattgttatcataaagcgaattggattggccatccggtgaaatacaaacacattatttacttgtttgttggatttactccgctcacacagcttactcctaagataatatttattgtattgctggtaaggagacactattata

SEQ ID NO: 505 - DNA, 636 bp, Enterovirus sp.
aagcaaggcaaacctgaccaatagtaggtgtggcacaccagccgcattttggtcaagcacttctgtttccccggaccgagtatcaataagctgctcacgcggctgaaggagaaaccgttcgttacccgaccagctacttcgagaaacctagtaacactatgaacgttgcggagtgtttcgttcagcacttcccccgtgtagatcaggtcgatgagtcaccgcattcctcacgggtgaccgtggcggtggctgcgttggcggcctgcctacgggttcgcccgtaggacgctctaataccgacatggtgtgaagagtccattgagctagctggtagtcctccggcccctgaatgcggctaatcctaactgcggagcaggtgctcacagaccagtgagtagcctgtcgtaacgggcaactctgcagcggaaccgactactttgggtgtttttccttttttcttctcttatattggctgcttatggtgacaattaaagaattgttaccatatagctattggattggccatccggtgacgagcagagccattgtttacctctttgttggatttgtacctttgaaccacaaagtcttgaataccattcatctcattttaaagttcaactcagctaaaagaaa

SEQ ID NO: 506 - DNA, 675 bp, Unknown
  Description of Unknown: SA5 sequence
agtacttggtattccggtacctttgtacacctatttacaaaccctaccccttgtaaccttagaagcaattatttaaccgctcactagggggtgtgctatccaagcacatcaagagcaagcacttctgtctccccgggaggggctaatggtacgctgtgcccacggcggaaatgagccctaccgttaaccggcagtctacttcgggaagcccagtaactacattgaaactttgaggcgttacactcagcacataaccccaatgtgtagttctggtcgatgagccttggcatcccccacaggcgactgtggccaaggctgcgttggcggccagcctgcggaccaaaagtccgtaggacgcctaattgtggacatggtgtgaagagcctactgagctagactgtagtcctccggcccctgaatgcggctaatcctaaccctggagcatccgcgtgcaacccagtacgtagggtgtcgtaatgcgtaagtctgggatggaaccgactactttgggtgtccgtgtttcttgtttttcatactgggtcgcttatggttacaactaattgttgtaatcattggcagtgcgcgctgaccacgcgattattgatatttccatttgttggatactccaatagtgtcaactcatatacacaacttttaccactgatcaagataaaa

SEQ ID NO: 507 - DNA, 675 bp, Enterovirus sp.
tgtgcgcctgttttgaaaccccctcccccaactcgaaacgtagaagtaatgtacactactgatcagtagcaggcgtggcgcaccagccatgtctcgatcaagcacttctgtttccccggactgagtatcaatagactgctcacgcggttgaaggtgaaaacgtccgttacccggctaactacttcgagaaacctagtagcaccatagaaactgcagagtgtttcgctcagcacttcccccgtgtagatcaggtcgatgagtcactgcaatccccacgggtgaccgtggcagtggctgcgttggcggcctgcctatggggcaacccataggacgctctaaggtggacatggtgtgaagagtctattgagctagttagtagtcctccggcccctgaatgcggctaatcctaactgtggagcgcatactcccaaaccagggagcagtgcgtcgtaacgggcaactccgcagcggaaccgactactttgggtgtccgtgtttccttttattcctatactggctgcttatggtgacaattgagagattgttaccatatagctattggattggccatccagtgtgtaatagagcaatcatttaccaatttgttggatttactccattaacccacacgtctctcaacacactacatttcatcttactactgaacactagaaa

SEQ ID NO: 508 - DNA, 675 bp, Unknown
  Description of Unknown: Mobovirus A sequence
tattctcccacaaaccttcttgtaactctgttaagccttttacatccatgtaatttaattttctccacctaaaaggatttcccccatggtcctttttggctcgaacaaatgctacatagggtcttgttttctccccctggctctcttgccagggttccataccccaattcctctatttccatgatttttcatcatggtttatttttactgtcttcttattttctgaggtgaccaactcctaagccgactgggtcgcggaagcccggactcctcgcatcactagggtgcgtagcgatgtaggcgaaaatattggttgctagatgcatacatatagtgaattgatactacaccaaactctgttctttttgaaactagctattttctaagtaaggtaggctacgggtgaaaccttaccattgcaggtacgtgaaccgcaacggacatttggccgaagactggtgtacccacgtcagttataggacctcttcaacgttggtggacggcatgtcactgattagttaggctagtgaatttaagttcagggggtatcttttagcttaagcgtgtattctagtaggacttgcagagcctccccacctaggaggatctctgtttatagccccttttccttgttccgttagttttccacacttttacaatatttgatgatttgtt

SEQ ID NO: 509 - DNA, 509 bp, Unknown
  Description of Unknown: Burpengary Virus sequence
ctccccccccttccccttcccgagtaggagattggcatgtatgctctacatgcccgattctctcttgctcactctcttaaatcctggtggcggtctcggattaaacatttatgtcgtatctgggatcgtcttacttggtggtaattcctctgttgcctagggacctccggactgccggattaaaggtctcaacagagggcaatgtacaaggaagtcattatacgctaattaagtatttgatgaatgactagtgtgacagggctgaggaactccccccgggtaaccggtgcctcagcgtccgaaagacacgtggataggatccaccctgttatacccagcacgatgtaatagtcaaatacctctgatttgtgtaggatgtataaattgtgcattgtaaattttgggcgtagagatgctccgaaggtaccccgttttacgggatctgatcggaggctaattacccaatgcgccctaaataacttcatataatttctttttctttattcaaa

SEQ ID NO: 510 - DNA, 675 bp, Hunnivirus sp.
taacgtttggcaagaaccctcacctgtcaattgggaccaccactttcagtgaccccatgcgaagtagtgagagagaataagctttcttacccttcatttgtgaacccttcagtcgaagccgcttggaataagataggaggaaaagttcattctaaatggagtgaaacatgtacttcagaatttctagcacgcgctgggctttcttgcgtgtgacggcactgtcttgccggagctctccacactgacaccccacgcttgtggaccttggtggcagatgacaacactgcagctggaattgagtgtctggtacactctgtgtaacagtgaaaacaatgtgatcacttcggtgagctagtagcctgtggaccaacaactggtaacagttgcctcaggggccaaaagccacggtgtttacagcaccctactggtttgattggagcaatccaagatgtcacagagttagtaattgccaagcagtccgtactggtatcttgacataccgtgcagttttggatagtgaaggatgccctgacggtacccataggtaacaagtgacactatggatctaagcaggggctcactctacgctgctttacagctggctgtgagttaaaaaacgtctagctatccacaacctaggggactaggttttccttttatttagattacaattat

SEQ ID NO: 511 - DNA, 675 bp, Hunnivirus sp.
acagtttttgacaaggaccctcacctgtcaatcgggaccaccactttcagtgaccccgtgcgaagtgttgagagaaagtgagctttcttacccttcatttgtgaacccttcagtcgaagccgcttggaataagatggaaggaaatgttcattctaaatggagtgaaacatatacttaatttccagtgtttagtggtctttccactagacaacggcactgtcttgccggaactctacacaccaacattccacgcttgtgggactcaaatgttggatgacacagttgtagctggaactgagtgtttagtgcactctgtgtaacagtgaaaacaatgtgatcacttcggtgggctagtagcctgtggactaacaactggtaacagttgcctcaggggccaaaagccacggtgttaacagcaccctactagtttgattggagcaatccatgatgttacagagttagtaactgccaaacagattgtactggtatcttggcataccgtgcaacttaggatagtgaaggatgccctggcggtacccataggtaacaagtgacactatggatctaaacaggggctcactctacgttgctttacaactagctgtgagttaaaaaacgtctaactatccacaacctaggggactaggttttcctttttatttttatacacaacta

SEQ ID NO: 512 - DNA, 240 bp, Unknown
  Description of Unknown: Ia Io sequence
ggtgtccgggtgtgtgggatagacccagatgtgcagtggatgcgagcatttgagtcagagtaggagcaagcccaggggcaaagggaccacattgtgtatcccgaatgaaggatcgagatttctctcctcattacccggtgtcttgtcactgttgggggggcccaacagtcttagtcctatactgcctgatagggtcgcggctggccggactcaagtgctatagtcagttgattttcactc

SEQ ID NO: 513 - DNA, 416 bp, Taura Syndrome Virus
ctttaaaagtcgtgcgtggcttcaccacgcacgatcagtactatcagttaaccactcttgaatatgctcaatgaccctattcaacactggtgtctcttagtacattattttagcacttaacgtgcatgagttttgcccatttctttcaaaaaaatgagtattcgaggagacgtcccgctccccgtcttatttcaaccgtagactcgacatctattggtggacatttaattccagtcgccgtaagttgcttctgccccgcgctatattttcttatacttatggttctataggtctggtttaaaacgtaaatagacggcccacaaactatagaacgcgtacccggaacgccaatcccggataagtccctggatatatagatgcaccgcaatataagcctgcagactgtctcatatact

SEQ ID NO: 514 - DNA, 604 bp, Acute bee paralysis virus
cccgtcaaaataacaacttataacacgatgttacccgaagaaaccattttagtgtaacatttaagattagaagtagttcatctaatagagataggcactattagaaggaggccttttctaaaggagccgttagtcagcccagacaagcgcagtactttagaagagagaagttccccgatagcgaccgaaaagacgcgttttccgtgctaactaatttaaatgtgggaacgaatattattattgaaattatgtgagccacgtagcaatcaagtcatgtttttgtcactacgtttactcatctaatgtagataattttgtttaagtacctatttaggtgtcatcccaccagagaagaaataatacgtaccggaacccagagtacaccccttattttaagccttactgggcttctctgttagttagtaatctggcccacgttttgcgttgagtggggtcccaacagtaggaattcgacggacaagtagcaagcgagtcggtaccaattggtttagccttcgaaattactctgggcaggaagttactaaacgagaactttctgcttaaatcccaacgcacaaacaaatagagtaaataaataattata

SEQ ID NO: 515 - DNA, 539 bp, Bovine rhinitis A virus
tttgttttgcggctttgccgttgttcgggttttacctgttttcacacagcaaaacaggccttctagtttcgtgcttaaacgagatcatgctcgaactagaactacatagctggtcactggactcataccacaccttgtggagctttatgggaaaggtggctagtgggctgtggaagtgactctgaccacatgcctctcaagtgtgggaaatcacggatcggtgtagcgacgacaacaggccttgggacaccctctccagtaatggagacccaaggggccaaaagccacgcctcgtgccctgttgttcacaaccccagtgcgacccgtgttagtacctatttgcgagaactgtgtctggacagctaaacacaaccctagtgggagactaaggatgcccaggaggtacccggaggtaacaagtgacactctggatctgacctggggagagagggcttgctttacaggcgcctctctttaaaaagcttctatgtctcatcaggcaccggaggccgggccttttccttttaaaattacactta

SEQ ID NO: 516 - DNA, 608 bp, Bovine rhinitis B virus
ccccccctacttaaagatgtacggttttgctgctttcacagagtaaagcagatagaggttctgaactggcaaactttacctcgaaacacgcccgtttttctgctgtgtctcacagactgtcctgtcacacttgtggcggcttgtgacactgtgaacatagtgagaccgaccaagacaacagtttcaagtgatgaacatcgaacgtctaaactggatccgtaactggacatgttagggcaaggacttcccccctggtaacaggagcctggctggccaaaagccccgctcattgagcctagcatgttgtcgaccctggactgttcagtttagttagtacatggaattcacttgtcacggttcttctgaactcggtctctagtatgacagcctaaggatgccctccaggtaccccggggtaacaagtgacacccgggatctgaggaggggactactttacgtagtttaaaaaacgtctaagctgttatggtgaccagaggctggcacctttcacttttaaaattacactactgactacaattgaagtgataacggttttacaggctttcaaactagttacacaagcactgttttcctgacacacacacttt

SEQ ID NO: 517 - DNA, 576 bp, Equine rhinitis A virus
aatattggcgcgcgcatttgcgcgcccccccccatttcagccccctgtcattgactggtcgaaggcgttcgcaataagactggtcgtcacttggctgttctatcgtttcaggctttagcgcgccctcgcgcggcgggccgtcaagcccgtgcgctgtatagcgccaggtaaccggacagcggcttgctggattttcccggtgccattgctctggatggtgtcaccaagctgacaaatgcggactgaacctcacaaagcgacacacctgtggtagcgctgcccaaaagggagcggaactcccccgccgcgaggcggtcctctctggccaaaagcccagcgttaatagcgccttttgggatgcaggagccccacctgccaggtgtgaagtggagtgagtggatctccaatttggtctgttctgaactacaccatctactgctgtgaagaatgccctggaggcaagctggttacagccctgaccaggggccctgcccgtgactctcgatcggcgcagggtcaaaaattgtctaagcagcagcaggaacgcgggagcgtttcttttccctttgtatcgac

SEQ ID NO: 518 - DNA, 466 bp, Unknown
  Description of Unknown: GFTV sequence
atggggaagggtatgacgtgccccttccttcttcggagaactcgctctagtggtctttccacttctggaaaagagtgagtgcacgtgatcaggaccgtcgaagacgacaaatacctggtgctctatctcatagacgtttcacagctgtagcgacccctcagtagcagcggaagccccctcctggtgacaggagcctctgcggccaaaagccacgtggataagatccactgctgagggcggtgcgaccctagcaccctgtgatgcatactagttgtagcgtgccggactattggtctgtcataagacacctgatagagagaccaagaatgtcctggaggtaccccgcgtgcgggatctgaccaggagaccattgcccaatgctttacaacgggtctatggtttaaaaactgtcgcagtctctccaaaccaagtggtcttggttttcaattactttgaatatttcact

SEQ ID NO: 519 - DNA, 675 bp, Unknown
  Description of Unknown: SAFV V13C sequence
ttttcgacgtggttggaattgccatcatttccgacgaaagtgctatcatgcctccccgattatgtgatgttttctgccctgctgggcggagcattctcgggttgagaaaccttgaatctttttctttggaaccttggttcccccggtctaagccgcttggaatatgacagggttattttcttgatcttatttctacttttgcgggttctatccgtaaaaagggtacgtgctgccccttccttctctggagaattcacacggcggtctttccgtctctcaacaagtgtgaatgcagcatgccggaaacggtgaagaaaacagttttctgtggaaatttagagtgcacatcgaaacagctgtagcgacctcacagtagcagcggactcccctcttggcgacaagagcctctgcggccaaaagccccgtggataagatccactgctgtgagcggtgcaaccccagcaccctggttcgatgatcattctctatggaaccagaaaatggttttctcaagccctccggtagagaagccaagaatgtcctgaaggtaccccgcgtgcgggatctgatcaggagaccaattggcggtgctttacactgtcactttggtttaaaaattgtcacagcttctccaaaccaagtggtcttggttttccaattttgttgaatggcaat

SEQ ID NO: 520 - DNA, 675 bp, Unknown
  Description of Unknown: SAV P-113 sequence
ggagatctaagtcaaccgactccgacgaaactaccatcatgcctccccgattatgtgatgctttctgccctgctgggtggagcatcctcgggttgagaaaaccttcttcctttttccttggaccccggtcccccggtctaagccgcttggaataagacagggttatcttcacctcttccttcttctacttcatagtgttctatactatgaaagggtatgtgtcgccccttccttctttggagaacacgcgcggcggtctttccgtctctcgaaaagcgcgtgtgcgacatgcagagaaccgtgaagaaagcagtttgcggactagctttagtgcccacaagaaaacagctgtagcgaccacacaaaggcagcggaccccccctcctggcaacaggagcctctgcggccaaaagccacgtggataagatccacctttgtgtgcggcacaaccccagtgccctggtttcttggtgacacttcagtgaaaacgcaaatggcgatctgaagcgcctctgtaggaaagccaagaatgtccaggaggtaccccttccctcgggaagggatctgacctggagacacatcacatgtgctttacacctgtgcttgtgtttaaaaattgtcacagctttcccaaaccaagtggtcttggttttcactctttaaactgatttcact

SEQ ID NO: 521 - DNA, 612 bp, Unknown
  Description of Unknown: VHEV sequence
aattccttcttcctttctccttggacctcggtcccccggtctaagccgctcggaatatgacagggttattttcacctcttctctcttctacttcatagtgttctatactatgaaagggtatgtgtcgccccttccttcttggagaacgtgcgtggcggtctttccgtctctcgaaaaacgtgcgtgcgacatgcagagtaacgcaaagaaagcagttcttggtctagctctggtgcccacaagaaaacagctgtagcgaccacacaaaggcagcggaaaccccctcctggtaacaggagcctctgcggccaaaagccacgtggataagatccacctttgtgtgcggtgcaaccccagcaccctggtttcttggtgacaccttagtgaaccctcgaatggcaatctcaagcgcctctgtaggaaagccaagaatgtccaggaggtaccccttcctcatggagggatctgacctggagacacatcacacgtgctatacacttgtgcttgtgtttaaaaattgtcacagctttcccaaaccaagtggtcttggttttcccttaacttcgaaaagtcactatggcctgcaaacatggatacccagacgtgtgccct

SEQ ID NO: 522 - DNA, 675 bp, Unknown
  Description of Unknown: TRV NGS910 sequence
atgcgacgtggttggagattaaaccgactccgacgaaagtgctatcatgcctccccgattatgtgatgttttctgccctgctgggcggagcattctcgggttgatacaccttgaatccttcatccttggacctcaggtcccccggtctaagccgcttggaatacgacagggttattttccaatcttctcctttctactttcatgagtcctattcatgaaaagggtctgtgctgccccttccttcttggagaatctgcgcggcggtctttccgtctctcgaaaagcgcagatgcagcatgctggaaccggtgaagaaaacagttctttgtggaaacttagagcagacatcgaaacagctgtagtgacctcacagtagcagcggaaccccctcctggtaacaggagcctctgcggccaaaagccccgtggataagatccactgctgtgagcggtgcaaccccagcaccctggttcgatggttgttctctgtggaaccagagaatggtctttctcaagccctccagtagagaagccaagaatgtcctgaaggtaccccgcatgcgggatctgatcaggagaccaatcgtcagtgctttacactggcgctttggtttaaaaactgtcacagcttctccaaaccaagtggtcttggttttcacttttatcaaactgtttc

SEQ ID NO: 523 - DNA, 551 bp, Unknown
  Description of Unknown: EMCV2 RD1338 sequence
aaatactggtcgaaaccgcttgggataagaccggggtttgttaatgtctcaatgttattctccacccaattgacgtcttttgtcaattggagggcagtgaaaccttgcccttgcttcttgcagaggattcccagtggtctttccgctctcgacaagggaattcatgatccaccaaaagttgtgaagagagcaggtcccatggaagctttctgacgactgatgatgactgtagcgaccctttgcaggcagcggacccccccacctggtgacaggtgcctctgcggccaaaagccacgtgtttaacagacacctgcaaaggcggcacaaccccagtgcctcatcaaaagtctgatgactgtggaaatagtcaaccggcttttcttaagcaaatttggtgtcggggctgaaggatgcccggaaggtaccacactggttgtgatctgatccggggccacagtacatgtgctttacacatgtagctgcggttaaaaaacgtctaggccccccgaaccacggggacgtggttttcctttgaaaaccacgattacaat

SEQ ID NO: 524 - DNA, 675 bp, Unknown
  Description of Unknown: EMCV1 JZ1203 sequence
gtctgctcgatatcgcaggctgggtccgtgactacccactccccctttcaacgtgaaggctacgatagtgccagggcgggtactgccgtaagtgccaccccaaaacaacaacaaaccccccctaacattactggccgacgccgcttggaataaggccggtgtgcgtttgtctatatgttatttcccaccacattgccgtcttttggcaatgtgtgggcccggaaacctggccctgtcttcttgacgagcattcctaggggtctttcccctctcgccaaaggaatgcaaggtctgttgaatgtcgtgaaggaagcagttcctctggaagcttcttgaagacaaacaacgtctgtagcggccctttgcaggcagcggaaccccccacctggcgacaggtgcctctgcggccaaaagccacgtgtataagatacacctgcaaaggcggcacaaccccagtgccacgttgtgagttggatagttgtggaaagagtcaaatggctctcctcaagcgtattcaacaaggggctgaaggatgcccagaaggtaccccattgtatgggatctgatctggggcctcggtgcacatgctttacatgtgtttagtcgaggttaaaaaacgtctaggccccccgaaccacggggacgtggttttcctttgaaaaacacgatgataat

SEQ ID NO: 525 - DNA, 544 bp, Unknown
  Description of Unknown: EMCV1 AnrB-3741 sequence
atgtggtcgaagccacttggaataagaccggcgtgcgcttgtctatatgttacttccaccacattgccgtcttttggcaatgtgagggcccggaacctggccctgtcttcttgacgaacattcctaggggactttcccctctcgccaaaggaatgtaaggtctgttgaatgtcgtgaaggaagcagttcctctggaagcttcttgaagacaaacagcgtctgtagcgaccctttgcaggcagcggaaccccccacctggtaacaggtgcctctgcggccgaaagccacgtgtataagatacacctgcaaaggcggcacaaccccagtgccacgttgtgcgttggatagttgtggaaagagtcaaatggctttccccaagcgtattcaacaaggggctgaaggatgcccagaaggtaccccactggttgggatctgatctggggcctcggtgcaggtgctttacacctgttgagtcgaggttaaaaaacgtctaggccccccgaaccacggggacgtggttttcctagaaaaccactatgacaat

SEQ ID NO: 526 - DNA, 675 bp, Cosavirus sp.
cgtgctttacacggtttttgaaccccacaccggctgtttggcgcttgcaggacagtaggtatattttctttcatttctcttttctagccgcgtaggttctatctacgcgggcggagtgatactcccgctccttcttggacaggcggcctccacgctctttgtggatcttaaggctgccaagtcactggtgtttgaagtgaagaatggagagacactagggcgtttcatgtggctttgccagggattgtagcgatgctgtgtgtgtgtgcggatttcccctcgtggcgacacgagcctcacaggccaaaagccctgtccgaaaggacccacacagtggggttgccccgacccctcccttcaaagctttgtgtaaacaaacttttgtttagactttcttaagcttctctcacatcaggccccaaagatgtcctgaaggtaccctgtgtatctgaggatgagcaccaccaactacccggacttgtgggacgtgtcccacagacgcatgtggtattccagccccctccttttgaggagggggcttttgctcgctcagcacaggatctgatcaggagattcatctctggtgctttacaccagagcatggatttaaaaattgcccaaggcctggcaaacaacctaggggactaggttttctctattttaaaagatgtcaat

SEQ ID NO: 527 - DNA, 675 bp, Cosavirus sp.
cgtgctttacacggtttttgaaccccacaccggctgtttggcgcttgcaggacagcaggtttattttcttttaactctctctttctagccacacacgatctatgtgtgtgggcggagtgatactcccgttccttcttggacaggcggcctccacgccctttgtggatcttaaggctaccaagtcactggtgttggaaagtgaagagaaaggagttccttgggaactacatgtggcattgacagaggttgtagcgatgctgtgtgtgtgtgcggattacccccgtggcgacacggaccccacaggccaaaagccctgtccgaaaggacccacacagtggagcaaccccagctcccctcttcaatgttttgtgttagcaaccttggtattattttctctcaagcttccaatacaccgggccccaaagatgtcctgaaggtaccccgtgtatctgaggatgagcaccatcaactacccggacttgttctttcgagaacagacgcatgtggtaacccagccccgatcctaaggggtcggggcttttgctcactcagcacaggatctgatcaggagacctcccccccctgctttacagggggcgggggtttaaaaattgcccaaggcctggcaaataacctaggggactaggttttcctttttattttaaagttgtcaat

SEQ ID NO: 528 - DNA, 675 bp, Cosavirus A
ccgtgctttacacggtttttgaaccccacaccggctgtttggcgcttgcaggacagcaggtttattttcttatgctctttatttctagccaacagggttctatcctgttgggcggagtgatactcccgttccttcttggacagattgcctccacgatctttgtggatctcaaggtgatcaagtcactggtaaatagagcgaaggttgaggaaacctgaggaatttccatgtggttttgccaggagttgtagcgatgctgtgtgtgtgtgcggatttcccctcatggcaacatgagcctcacaggccaaaagccctgtccgaaaggacccacacagtggagcaatcccagctccctcctacaaagctttgtgagaatgaactcacgtttattcttctttattctctgtttacatcaggccccaaagatgtcctgaaggtaccttgtgtatctgggcatgagcaccatcaactacccggacttgcatttcggtgcagacacatgtggttacccagcccctctgctttggcagaggggcttttgctcgctcagcacgagatctgatcaggagcccttcccagtgtgctttacacctggcggggggttaaaaattgcccaaggcctggcaaaataacctaggggactaggttttccttttattaacaatgtctgtcatt

SEQ ID NO: 529 - DNA, 660 bp, Malagasivirus B
ctttattttcttatgtaactcttctttttaagttttattttgcctacttgtgagcttatgcgggaccactgtcttagacaaccccacatttgtcatgagtaagtacacgcaaccattacgattactttttaaccgtctgaccttttgataacaactgaagttaggcgtgaaacatgcatttataccaaagtagccccgcatttccccactacggtgggggggctaccctactggctttggaactgtagccattatgtgttgcctggctttcaggatctcacaacacaacagttctctcacaatggaatatgggtgagattgcagtgacatgaacaagtatctagtagtacatagactcaagcctagttgcctgcggaacaacatgtggtaacacatgccccagggtccaaaagacaagggttaacagccccttctaggtgtctgtgtgtgaagaatactttagtagtgttgttatgatctcacctgttagtacagaatgagtatggcttggtgaaggatgtcctacaggtacccattatatggatctgagtaggagaccactagtggtggctttaccgccaggtgagtggtttaaaaagcgtctagccaagccaacagcactagggatagtgctttctatattttatattttcagtgtat

SEQ ID NO: 530 - DNA, 654 bp, Mosavirus sp.
cccccccctcaaattgcaacgatatagctaatggcgagattgagatgctatatcacctcttctaagttatagacctcatctgattgataaggacgtaatttggtcgaaaccgcttggaataagaccgatgcgcgtagtcatgatgatgatgtaagatctaggaacttatccaatctgcttatgtctatgtaagtagaggggcaggcctcattgccctaattctttctaccgagtatctgctagggtttctagcggcttgaatacttggattgagggatacaagatactactgatcgattgtcgattgggaaacttgtagatacttcaaagctaccagtagcgtggactcacagccagcggactacccctcatggtaacatgagcctctgggcccacaaggcacgtcgcaagacctgtgagacggcaaccccagcctagctttgttgaggaaacaagcgataacatgacatgagagaccggaaggattcttgtattgtgagccgaaggatggcctctaggtacctcattttatgagatctgaggaggtgctcttgagttggtgctttacactgacaacacagagttaaaaagcgtctaagctcacccggaaattgggaaatttccgttatttccattttgtttgcaaagtcgttc

SEQ ID NO: 531 - DNA, 654 bp, Unknown
  Description of Unknown: SVV sequence
ctgggccctcatgcccagtccttcctttccccttccggggggtaaaccggctgtgtttgctagaggcacagaggagcaacatccaacctgcttttgtggggaacggtgcggctccaattcctgcgtcgccaaaggtgttagcgcacccaaacggcgcatctaccaatgctattggtgtggtctgcgagttctagcctactcgtttctcccctatccactcactcacgcacaaaaagtgtgctgtaattacaagatttagccctcgcacgagatgtgcgataaccgcaagattgactcaagcgcggaaagcgctgtaaccacatgctgttagtcccttcatggctgcgagatggctatccacctcggatcactgaactggagctcgaccctccttagtaagggaaccgagaggccttcttgcaacaagctccgacacagagtccacgtgattgctaccaccatgagtacatggttctcccctctcgacccaggacttctttttgaatatccacggctcgatccagagggtggggcatgatccccctagcatagcgagctacagcgggaactgtagctaggccttagcgtgccttggatactgcctgatagggcgacggcctagtcgtgtcggttctataggtagcacatacaaat

SEQ ID NO: 532 - DNA, 331 bp, Teschovirus A
actagtccttggacttttgttgtgtttaaacacagaaatttaattacctggccatgaattcattggattaacccttctgaaagacttgctctggcgcgagctaaagcgcaattgtcaccaggtattgcaccagtggtggcgacagggtacagaagagcaagtactcctgaccgggcaatgggactgcattgcatatccctaggcacctattgagatttctctggggcccaccggcgtggagttcctgtatgggaatgcaggactggacttgtgctgcctgacagggtcgcggctggccgtctgtactttgtatagtcagttgaaactcacc

SEQ ID NO: 533 - DNA, 416 bp, Teschovirus B
cttccttttaattcgtaactgataagtgatagtccttggaagctaggtatttgttacgctagttttggattatcttgtgcccaacatttgttttcgaacatatgttgtgtttaaacacagaaatctagtttctttggttatgagtttaatggaatatccttttgaaagacttgccttggcgcgggctagagcgcaattgtcaccaggtattgcaccaatggtggcgacagggtacagaagagcaagtactcctgactgggtaatgggactgcattgcatatccctaggcatctattgagatttctctggagcccaccagcatggagttcctgtatgggaatgcaggactggacttgtgctgcctgacagggtcgcggctggccgtctgtactttgtatagtcagttgaaactcatt

SEQ ID NO: 534 - DNA, 664 bp, Tottorivirus sp.
cccctttacgtaactgcaacttaaagagtaccctactgcattggatgtgtggtaaacttttacgcacacatttgtagtagtgttagttatgttctacctaatgagtatgcatgcacccgtcgaaacacgcttgtgataagataggtgagtccatgtgactaatctcattaagataaataagcaccctacaacgcacggcacgctcgtgtcttccgtgcggggccgggacaacagcggcctaaatcttctaggtgaccaccatgcttttgggactatggcaccactgtggacgtgagtacctggcagtaagtctgtgaaaagatggaaggtgtcccaagctatggggcgtatgcatatagcctgcggaacaaacaacggcgacgttgtccccagggcccaaaaggcacgtggataagatccacctatatgtttaccccatagtgtaagtcactggaagtcctagtaatggatgtctggagtaaggctcacggggtagggcgaaggatgcccagaaggtacccgtaggtaaccttaagagactatggatctgatctggggaccggatggcgccatcaccatgacgtggaggccggtttaaaaaacgtctaagcccgaccaacaacctaggggactaggttttccttttttattcatgtatgacgtt

SEQ ID NO: 535 - DNA, 675 bp, Unknown
  Description of Unknown: Posavirus 1 sequence
acatttccttgcgtgcgcacccgaaaatttattgaacttggcttgaatcataagtaatgcttcttatagcggacactttgagaatataatgcttgtatggattaatgtatactgttttaaataacaaacctagacacgcagttgcgttgatggttgtatcaatcacatataagtgttgaactcgtgttaatcctcgatcgctatatgtttgccgcctacttccaataaaatagattacatgcgcgtcatgcctttgtgggttacctattggcctctgacaaaaacaagtcgtaagatttgtagcttcccggtgtaaaaagctgggcgcggtctggctctcgtagggtggaaaggtccaccaatggctggttgagtgtaagctccggtgtcctggttgtcgcaattccaggcgtcgtaataacctatattgcatctgactctaactcttgtggctctactgtatctagttcttgttctactaactctaataatactactggctctaatactgaaaaacttacatatgttaatatagataatatccttgatcctgatatccctcacgtcactgaagttcgccgaaaacgaatttcagatcatatcattgaatctcaaggatgtacttgctctgaacctactataactcctcatgcgttttcattttctactcttggc

SEQ ID NO: 536 - DNA, 675 bp, Unknown
  Description of Unknown: A105-675 sequence
ccacccacagcaagaatgccatcatctgtcctcacccccatttctcccctccttcccctgcaaccattacgcttactcgcatgtgcattgagtggtgcacgtgttgaacaaacagctacactcacgtgggggcgggttttcccgcccttcggcctctcgcgaggcccacccttccccttcctcccataactacagtgctttggtaggtaagcatcctgatcccccgcggaagctgctcgcgtggcaactgtggggacccagacaggttatcaaaggcacccggtctttccgcctccaggagtatccctgctagtgaattctagtggggctctgcttggtgccaacctcccccaaatgcgcgctgcgggagtgctcttccccaactcaccctagtatcctctcatgtgtgtgcttggtcagcatatctgagacgatgttccgctgtcccagaccagtccagcaatggacgggccagtgtgcgtagtcgtcttccggcttgtccggcgcatgtttggtgaaccggtggggtaaggttggtgtgcccaacgcccgtactttggtgacaactcaagaccacccaggaatgccagggaggtaccccgcctcacggcgggatctgaccctgggctaattgtctacggtggttcttcttgcttccatttctttcttctgttc

SEQ ID NO: 537 - DNA, 675 bp, Unknown
  Description of Unknown: A110-675 sequence
acctttgtgcgcctgttttataccccctcccccaactgtaacttagaagtaacacacaccgatcaacagtcagcgtggcacaccagccacgttttgatcaagcacttctgttaccccggactgagtatcaatagactgctcacgcggttgaaggagaaagcgttcgttatccggccaactacttcgaaaaacctagtaacaccgtggaagttgcagagtgtttcgctcagcactaccccagtgtagatcaggtcgatgagtcaccgcattccccacgggcgaccgtggcggtggctgcgttggcggcctgcccatggggaaacccatgggacgctctaatacagacatggtgcgaagagtctattgagctagttggtagtcctccggcccctgaatgcggctaatcctaactgcggagcacacaccctcaagccagagggcagtgtgtcgtaacgggcaactctgcagcggaaccgactactttgggtgtccgtgtttcattttattcctatactggctgcttatggtgacaattgagagatcgttaccatatagctattggattggccatccggtgactaatagagctattatatatccctttgttgggtttataccacttagcttgaaagaggttaaaacattacaattcattgttaagttgaatacagcaaa

SEQ ID NO: 538 - DNA, 675 bp, Unknown
  Description of Unknown: 18-675 sequence
cccacagcaagaatgccatcatctgtcctcacccccaattttcccttttcttcccctgcaaccattacgcttactcgcatgtgcattgagtggtgcatgtgttgaacaaacagctacactcacatgggggcgggttttcccgccctacggcctctcgcgaggcccaccccttccctccccttataactacagtgctttggtaggtaagcatcctgatcccccgcggaagctgctcacgtggcaactgtggggacccagacaggttatcaaaggcacccggtctttccgccttcaggagtatccctactagtgaattctagcggggctctgcttggtgccaacctcccccaaatgcgcgctgcgggagtgctcttccccaactcaccctagtatcctctcatgtgtgtgcttggtcagcatatctgagacgatgttccgctgtcccagaccagtccagtaatggacgggccagtgcgtgtagtcgtcttccggcttgtccggggcatgtttggtgaaccggtggggtaaggttggtgtgcccaacgcccgtactttggtgacacctcaagaccacccaggaatgccagggaggtaccccacctcacggtgggatctgaccctgggctaattgtctacggtggttcttcttgcttccacttctttcttctgttcacg

SEQ ID NO: 539 - DNA, 675 bp, Unknown
  Description of Unknown: A115-675 sequence
acctttgtgcgcctgttttataccccccccaacctcgaaacttagaagtaaagcaaacccgatcaatagcaggtgcggcgcaccagtcgcatcttgatcaagcacttctgtaaccccggaccgagtatcaatagactgctcacgcggttgaaggagaaaacgttcgttacccggctaactacttcgagaaacccagtagcatcatgaaagttgcagagtgtttcgctcagcactacccccgtgtagatcaggccgatgagtcaccgcacttccccacgggcgaccgtggcggtggctgcgttggcggcctgcctatggggcaacccataggacgctctaatacggacatggtgcgaagagtctattgagctagttagtagtcctccggcccctgaatgcggctaatcctaactgcggagcacatacccttaatccaaagggcagtgtgtcgtaacgggtaactctgcagcggaaccgactactttgggtgtccgtgtttccttttaatttttactggctgcttatggtgacaattgaggaattgttgccatatagctattggattggccatccggtgactaacagagctattgtgttccaatttgttggatttaccccgctcacactcacagtcgtaagaacccttcattacgtgttatttctcaactcaagaaa

SEQ ID NO: 540 - DNA, 675 bp, Unknown
  Description of Unknown: A73-675 sequence
ttactccattcagcttcttcggaacctgttcggaggaattaaacgggcacccatactccccccaccccccttttgtaactaagtatgtgtgctcgtgatcttgactcccacggaacggaccgatccgttggtgaacaaacagctaggtccacatcctcccttcccctgggagggcccccgccctcccacatcctccccccagcctgacgtatcacaggctgtgtgaagcccccgcgaaagctgctcacgtggcaattgtgggtccccccttcatcaagacaccaggtctttcctccttaaggctagccccggcgtgtgaattcacgttgggcaactagtggtgtcactgtgcgctcccaatctcggccgcggagtgctgttccccaagccaaacccctggcccttcactatgtgcctggcaagcatatctgagaaggtgttccgctgtggctgccaacctggtgacaggtgccccagtgtgcgtaaccttcttccgtctccggacggtagtgattggttaagatttggtgtaaggttcatgtgccaacgccctgtgcgggatgaaacctctactgccctaggaatgccaggcaggtaccccacctccgggtgggatctgagcctgggctaattgtctacgggtagtttcatttccaatccttttatgtcggagtc

SEQ ID NO: 541 - DNA, 675 bp, Kobuvirus sp.
ttactccattcagcttcttcggaacctgttcggaggaattaaacgggcacccatacacccccatcccctttctgcaacttaagtatgtgtgctcgtgatcttgactcccacggaatggatcgatccgctggagaacaaactgctagatccacatcctcccttcccctgggaggaccttggtcctcccacatcctccccccagcctgacgtaccacaggctgtgtgaagcccccgcgaaagctgctcacgtggcaattgtgggtccccccttcatcaagacaccaggtctttcctccttaaggctagccccgatgtgtgaattcacattgggcaactagtggtgtcactgtgcgctcccaatctcggccgcggagtgctgttccccaagccaaacccctggcccttcactatgtgcctggcaagcatacctgagaaggtgttccgctgtggctgccagcctggtaacaggtgccccagtgtgcgtaaccttcttccgtcttcggacggtagtgattggttaagatttggtgtaaggtccatgtgccaacgccctgtgcgggatgaaacctctactgccctaggaatgccaggcaggtaccccacccccgggtgggatctgagcctgggctaattgtctacgggtagtttcatttccaattcttttatgtcggagtc

SEQ ID NO: 542 - DNA, 675 bp, Aichivirus sp.
ttactccattcagcttcttcggaacctgttcggaggaattaaacgggcacccatacatccccatcccctttctgtaacttaagtatgtgtgcttgtaatcttgactcccacggaatggatcgatccgctggagaacaaactgctagatccacatcctcccttcccctgggaggaccttggtcctcccacatcctccccccagcctgacgtaccacaggctgtgtgaagcccccgcgaaagctgctcacgtggcaattgtgggtccccccttcatcaagacaccaggtctttcctccttaaggctagccccgatgtgtgaattcacattgggcaactagtggtgtcactgtgcgctcccaatctcggccgcggagtgctgttccccaagccaaacccctggcccttcactatgtgcctggcaagcatatctgagaaggtgttccgctgtggctgccagcctggtaacaggtgccccagtgtgcgtaaccttcttccgtctccggacggtagtgattggttaagatttggtgtaaggttcatgtgccaacgccctgtgcgggatgaaatctctactgccctaggaatgccaggcaggtaccccaccctcgggtgggatctgagcctgggctaattgtctacgggtagtttcatttccaatccttttatgtcggagtc

SEQ ID NO: 543 - DNA, 675 bp, Aichivirus sp.
actccattcagcttcttcggaacctgttcggaggaattaaacgggcacccatacacccccatccccttttttgcaacttaagtatgtgtgctcgtaatcttgactcccacggaatggatcgatccgctggagaacaaactgctagatccacatcctccctcccccctgggaggacctcggtcctcccacatcctccccccagcctgacgtatcacaggctgtgtgaagcccccgcgaaagctgctcacgtggcaattgtgggtccccccttcatcaagacaccaggtctttcctccttaaggctagtcccgatgtgtgaattcacatcgggcaactagtggtgtcactgtgcgctcccaatctcggccgcggagtgctgttccccaagccaaacccctggcccttcactatgtgcctggcaagcatatctgagaaggcgttccgctgtggctgccagcctggtaacaggtgccccagtgtgcgtaaccttcttccgtccccggacggtagtgattggttaagacttggcgtaaggttcatgtgccaacgccctgtgcgggatgaaacctctactgccctaggaatgccaggcaggtaccccaccttcgggtgggatctgagcctgggctaattgtctacgggtagtttcatttctaattctttcatgtcggagtc

SEQ ID NO: 544 - DNA, 675 bp, Aichivirus sp.
ttactccattcagcttcttcggaacctgttcggaggaattaaacgggcacccatacacccccaccccctttttgcaacttaagtatgtgtgctcgtgatcttgactcccacggaatggatcgatccgctggagaacaaactgctagatccacatcctcccttcccttgggaggacctcggtcctcccacatcctccccccagcctgacgtaccacaggctgtgtgaagcccccgcgaaagccgctcacgtggcaattgtgggtccccccttcattaagacaccaggtctttcctccttaaggctagtcccgatgtgtgaattcacattgggcaactagtggtgtcactgtgcgctcccaatctcggccgcggagtgctgttccccaagccaaacccctggcccttcactatgtgcctggcaagcatatctgagaaggtgttccgctgtggctgccagcctggtaacaggtgccccagtgtgcgtaaccttcttccgtcttcggacggtagtgattggttaagatttggcgtaaggttcatgtgccaacgccctgtgcgggatgaaacctctactaccctaggaatgccaggcaggtaccccaccctcgggtgggatctgagcctgggctaattgtctacgggtagtttcatttccaattcttctatgtcggagtc

SEQ ID NO: 545 - DNA, 675 bp, Aichivirus sp.
tactccattcagcttcttcggaacctgttcggaggaattaaacgggcacccatacacccccacccccttttctgcaacttaagtatgtgtgctcgtaatcttgactcccacggaatggatcgatccgctggagaacaaactgctagatccacatcctcccttcccctgggaggaccccggtcctcccacatcctccccccagcctgacgtatcacaggctgtgtgaagtccccgcgaaagctgctcacgtggcaattgtgggtccccccttcatcaagacaccaggtctttcctccttaaggctagccccgatgtgtgaattcacattgggcaactagtggtgtcactgtgcgctcccaatctcggccgcggagtgctgttccccaagccaaacccctggcccttcactatgtgcctggcaagcatatctgagaaggtgttccgctgtggctgccagcctggtaacaggtgccccagtgtgcgtaaccttcttccgtctccggacggtagtgattggttaagatttggtgtaaggttcatgtgccaacgccctgtgcgggatgaaacctctactgccctaggaatgccaggcaggtaccccaccttcgggtgggatctgagcctgggctaattgtctacgggtagtttcatttccaattcttttatgtcggagtc

SEQ ID NO: 546 - DNA, 664 bp, Aichivirus sp.
gcttcttcggaacctgttcggaggaattaaacgggcacccatacacccccacccccttttctgcaacttaagtatgtgtgctcgtaatcttgactcccacggaatggatcgatccgctggagaacaaactgctagatccacatcctcccttcccctgggaggaccccggtcctcccacatcctccccccagcctgacgtatcacaggctgtgtgaagtccccgcgaaagctgctcacgtggcaattgtgggtccccccttcatcaagacaccaggtctttcctccttaaggctagccccgatgtgtgaattcacattgggcaactagtggtgtcactgtgcgctcccaatctcggccgcggagtgctgttccccaagccaaacccctggcccttcactatgtgcctggcaagcatatctgagaaggtgttccgctgtggctgccagcctggtaacaggtgccccagtgtgcgtaaccttcttccgtctccggacggtagtgattggttaagatttggtgtaaggttcatgtgccaacgccctgtgcgggatgaaacctctactgccctaggaatgccaggcaggtaccccaccttcgggtgggatctgagcctgggctaattgtctacgggtagtttcatttccaattcttttatgtcggagtc

SEQ ID NO: 547 - DNA, 675 bp, Aichivirus sp.
tactccattcagcttcttcggaacctgttcggaggaattaaacgggcacccactttcctgtcctctccccttttctgtaactccaagtgtgtgctcgtaatcttgactcccgcggattgaccgctccgctggtgaacaaactgctaggtcatctcctccccacccttgggcgtccttccgggcgtccacaccctccccccagcctgacgtgtcacaggctgtacaaagaccccgcgaaagctgctaacgtggcaattgtgggtcccccctttgtaaaggaaccgagtctttctcccttaaggctagacccctgtgtgaattcacaggtggcaactagtggttccactgcatgctcccgacctcggccgcggagtgctgttccccaagtcgtaacactgaccttcacttatgtgcctggcaagcatatctgagaagatgttccgctgtggctgccaaacctggtaacaggtgccccagtgtgcgtagtcttcttccgtcttcggacggtaggtgttaggtaaagatgcggcgtaaggttcaagtgccaacgccctggaagggatgacccttctactgccctaggaatgccgcgcaggtaccccaggttcgcctgggatctgagcgcgggctaattgtctacgggtagtttcatttccctcttcttccactggcatc

SEQ ID NO: 548 - DNA, 675 bp, Aichivirus sp.
actccattcagcttcttcggaacctgttcggaggaattaaacgggcacccactttcctgtcctctccccctttctgcaactcaagtgtgtgctcgtaatcctgactcccacgggttgaccgccccgttggtgaacaaacagctaggtcattccctccctacccctgggcgccatttcagtggcgttcatatcctccccccagcctgacgtgtcacaggctgtgcaaagtccccgcgaaagctgctcacgtggcaattgtgggtcccccctttgtgaaggaaccgagtctttctcccttaaggctagacccctgtgtgaactcacaggtggcaactagtggttccactgcatgctcccgacctcggccgcggagtgctgttccccaagtcgtgacactgacctccacttatgtgcctggcaagcatatctgagaagatgttccgctgtggctgccaaacctggtaacaggtgccccagtgcgtgtagtcttcttccgtctccggacggtaagtgtgtggtaaagatgcggcgtaaggttcaagtgccaacgccctggaagggatgacccttctactgccctaggaatgccgcgcaggtaccccaggttcgcctgggatctgagcgcgggctaattgtctacgggtagtttcatttccctctcttttcactggcatc

SEQ ID NO: 549 - DNA, 498 bp, Pestivirus sp.
gtataagggttgggaaccttgtaccaagctacctctgccattcagtatttgggagtagaagtagatgtgtttacaaactcacacgtgtgggggcggggatagactgtgccagcggtcgtgtaccagcacctacgcatacgtgtggactgcgaaccaggagagcacctaggtctgacaagctgtgagaacacagtagtcgtcagtgagtcagctggtaaggatcacccacctggatactcacgtggacgagggagtttcccagtcagaaacctacaccagaggaggggtcctctggagacatggatggtctgagtaacagactatctactggggtgtgctgcctgacagggtctcggctgatagcctggctagcagtataaaaatcagttgaattggcatatgagttgtgaacatctagtaaacaatgaaagacaaaaacaaaaaatgagcataataaaaaaattgtacaatccactactcaggtgtggctgcagactt

SEQ ID NO: 550 - DNA, 576 bp, Kobuvirus sp.
tttgaaaagggggtgggggggcctcggccccctcaccctcttttccggtggccattcgcccgggccaccgttactccactccactccttcgggactggtttggaggaacacaacagggcttcccatccctgtttaccctttattccatcatcctttccccaagtttaccctatccacaccccactgactgactcctttggattttgacctcagaatgcctatttgacctcccactcgcctctcccttttcggattgccggtggtgcctggcggaaaaagcacaagtgtgttgcaggctaccaaactcctacccgacaaaggtgcgtgtccgcgtgctgagtaatgggataggagatgcctacaacaggctcgcccatgagtagagcatggactgcggtgcatgtgacttcggtcaccacgggcatagcattgctcacccgtgaatcaagtcatcgagatttctctgacctctgaagtgcactgtggttgcgtggctgggaatccacgcttgaccatgtactgcttgatagagtcgcggctggccgactcatgggttaaagtcagttgacaagacac

SEQ ID NO: 551 - DNA, 675 bp, Kobuvirus sp.
cctacccaagggttacatgggaccatattcctcctcccctgtaactttaagttttgtgcccgtattcttgactccaggcggatgttgtgtcgcccgtcctgtgaacaaacagctagacactttcctcccctccctctgggctgctccggcagtccactccctccccccagcgtaacatgccccgctggagtgatgcacctggaagtcgtggacgtgggttagtaacttcggtgaaaacccactataatgacaactggttgacccccacactcaaaggactcgagtctttctcccttaaggctagcccggccacatgaatttgcagctggcaactagtgagtccaccatgtcccgcaacctcggctgcggagtgctgttccccaagcgtatgccttccttctgtaagagtgcgcctggcaagcacatctgagaagtcgttccgctgcgtcgtgccaacctggcgacaggtgacccagtgtgcgtagacttcttccggattcgtccggctcttctctaggaaacatgcgtgtaaggttcatgtgccaaagccctgcgcgcggtgttcttctactgccctaggaatgtgccgcaggtacccctacttcggtagggatctgagcggtagctaattgtctacgggtagtttcatttccatcttctcttcaggtcgacatc

SEQ ID NO: 552 - DNA, 675 bp, Kobuvirus sp.
gaccttctggtacttcttcgcctgggtcacaaaagcgaagaacctgcctctctaacgccagacgagcggcattaaacttgaacttctggcactctccactctcccttttccctgtccctttccccactgcgctctcaaggtcgcgcaatcctgggactagcccagttttaaaagttcctggcaccctttgcccctctaggcccttaaggtaggaactgaccttgtgctgtgatctcggtgcgggagtgctaccacgtagtcatcgtaagcctcgtttctggttctgccctggcaaggctacagagtaccgtgttccgctgtggatgccatccgggtaaccggacccccagtgtgtgtagcggtatgttcacggtccgccgtgttcaccagattcctgacctggctttgctagaaatggtgtgtgcccaatccctgtgaccagtatcaattacatcacctaggaatgctaggaaggtaccccagtcctgagctgggatctgatcctaggctaattgtctacggtgatgctccttttattttcttacaactgctattgactgtctgattgctgattctgctcttgtgctcttctgctctggctcattctcaagggttctctttgtccaagatcctttggttctctccttgttccacttgccactgccaacgcttgtc

SEQ ID NO: 553 - DNA, 369 bp, Pestivirus sp.
gtatacgcagttagttcatcctgtgtatacagattggagactctaaaaacaacgattcggaataggggcccgcggcgaagaccgaagacaggctaaccatgccgttagtagggctagcaccaaaacgcgggaactagacacttaggagagtggtctggctactctaagaggtgagtacaccttaaccgtcaagggttctactcctcagttgaggactagagatgccctgtggacgggggcatgcccaagagttagcttagccggggcgggggttgttccggtgaaagtagcaatattgaccacactgcctgatagggcggagcaggccccctaggtagtctagtataaaatgtctgctgtacatggcac

SEQ ID NO: 554 - DNA, 399 bp, Pestivirus sp.
tacgcggggtataacgacagtagttcaagtgtcgttatgcatcattggccataacaaattatctaatttggaatagggacctgcgacctgtacgaaggccgagcgtcggtagccattccgactagtaggactagtacaaataggtcaactggttgagcaggtgagtgtgctgcagcggctaagcggtgagtacaccgtattcgtcaacaggtgctactggaaaggatcacccactagcgatgcctgtgtggacgaggacatgtccaagccaatgttatcagtagcgggggtcgttactgagaaagctgcccagaatgggtagttgcacatacagtctgataggatgccggcggatgccctgtattttgaccagtataaatattatccgttgtaaagcat

SEQ ID NO: 555 - DNA, 123 bp, Pestivirus sp.
gcagatatcggtggtggacctgggggttgggctcaccgtgccccttcatggggtagacctcactgcttgatagagtgccggcggatgcctcaggtaagagtataaaatccgttgttcactaac

SEQ ID NO: 556 - DNA, 382 bp, Pestivirus sp.
gtatacgagtttagctcaatcctcgtatacaatattgggcgtcaccaaatatagatttggcataggcaacaccccgatgcgaaggccgaaaagggctaaccatgcccttagtaggactagcaaaaaatcggggactagcccaggtggtgagcttcctggatgaccgaagccctgagtacagggcagtcgtcaacagttcaacacgcagaataggtttgcgtcttgatatgctgtgtggacgagggcatgcccacggtacatcttaacctatccgggggtcggataggcgaaagtccagtattggactgggagtacagcctgatagggtgttgcagagacccatctgataggctagtataaaaaactctgctgtacatggcac

SEQ ID NO: 557 - DNA, 373 bp, Unknown
  Description of Unknown: Classical swine fever virus sequence
gtatacgaggttagttcattctcgtatgcatgattggacaaattaaaatttcaatttggatcagggcctccctccagcgacggccgaactgggctagccatgcccacagtaggactagcaaacggagggactagccgtagtggcgagctccctgggtggtctaagtcctgagtacaggacagtcgtcagtagttcgacgtgagcagaagcccacctcgatatgctatgtggacgagggcatgcccaagacacaccttaaccctagcgggggtcgctagggtgaaatcacaccacgtgatgggagtacgacctgatagggtgctgcagaggcccactattaggctagtataaaaatctctgctgtacatggcac

SEQ ID NO: 558 - DNA, 222 bp, Pegivirus sp.
tcagggttggtaggtcgtaaatcccggtcaccttggtagccactataggtgggtcttaagagaaggttaagattcctcttgtgcctgcggcgagaccgcgcacggtccacaggtgttggccctaccggtgggaataagggcccgacgtcaggctcgtcgttaaaccgagcccgtcacccacctgggcaaacgacgcccacgtacggtccacgtcgcccttca

SEQ ID NO: 559 - DNA, 527 bp, Pegivirus sp.
cccggcactgggtgcaagccccagaaaccgacgcctatttaaacagacgttatgaaccggcgccgacccggcgaccggccaaaaggtggtggatgggtgatgccagggttggtaggtcgtaaatcccggtcatcttggtagccactataggtgggtcttaagggttggtcaaggtccctctggcgcttgtggcgagaaagcgcacggtccacaggtgttggccctaccggtgtgaataagggcccgacgtcaggctcgtcgttaaaccgagcccattacccacctgggcaaacaacgcccacgtacggtccacgtcgccctacaatgtctctcttgaccaataggctttgccggcgagttgacaaggaccagtgggggctgggcgacgggggtcgtataggaagaaaaatgccacccgccctcacccgaaggttcttgggctaccccggctgcaggccgccgcggagctggggtagcccaagaaccttcgggtgagggcgggtggcatttttcttcctataccgatc

SEQ ID NO: 560 - DNA, 402 bp, Pegivirus sp.
tggtcaccttggtagccactataggtgggtcttaagagaaggttaagattcctcttgtgcctgcggcgagaccgcgcacggtccacaggtgttggccctaccggtgtgaataagggcccgacgtcaggctcgtcgttaaaccgagcccatttcccgcctgggcaaacgacgcccacgtacggtccacgtcgcccttttaatgtctctcttgaccaataggttcatccggcgagttgacaaggaccagtgggggccgggggtcacagggatggaccctgggccctgcccttcccggcggggtggggaaagcatggggccacccagctccgcggcggcctgcagccggggtagcccaagaaccttcgggtgagggcgggtggcatttttcttcctataccgatc

SEQ ID NO: 561 - DNA, 531 bp, Unknown
  Description of Unknown: Hepatitis GB virus A sequence
gccgggtggaaggcccggaaccgccccaccacctcaactaggtggtaagggtacgtctatcggtccggctggcccgaaaggcggtggatcctgtgtgttagggttcgtaggtggtaaatcccagcacaggtggtaatcgctatagggcaggcttatcccggtgaccgcttccctggatcctggagcgggtcgtggcggcacggtccacaggagtggggcctccggtgtgaataagccctcgtctggagcatcagacgttaaactgagacgtcccgaagagatcggaacgacgccccacgtatggcaacgccgcttaaaacccttcggggacagctatgcgggttgacaatgccagtggggggccgggcccactattgttgtgggctccgagttcctctagggatggccgaaaggcagccatggggccacccaggcggcgccgtgctacaggcggcaaggggaaaaatccttcgggtgaccccgggtggcattccctcccttagcagcatgagtgtggtggtagctgcaacc

SEQ ID NO: 562 - DNA, 520 bp, Pegivirus sp.
ggggaatctcaccccccgtccggttccggaagaatcggaaaccgacaccctgaccaatcattcttgatcatagagtggatgttagtgaaagccagacgaaagccggcggatgggtggtgacagggttggtaggtcgtaaatcccggccaccctggtacccggtataagttgggcggaagctgactgaagctccgtgctcttttctgtgcgttcttggtgcacggtccacaggtgacgcctataccggtgtgaataataggccgactcgagcggagtcgttaaactgagaacctccatacggatggcaacttggcttgcgtacggggacgccgctaaagtcacagtgggttaagtccggcgggttgacaaccccagcaaggcgagggggtcctattgttggactctgccagttcccggtggaggtaggcatggggtggcccagctccgcggcgcgctacagccggggtagcccaaaatccgaaaggtgagggcgggccacatgtccgaaatttagtcaagc

SEQ ID NO: 563 - DNA, 524 bp, Pegivirus I
agaatggtctaagtggttgccaccgtggtccgaaggggaggaggacctacgctgccagggttggcaggtcgtaaatcccgggtgtaggagatccctccttgttaggactgctggtagctggggggtcggtgaccccctgggcaaccgccaaacccggacgaccgggtggcggctccatgttggcacggtccacaggtgtgaaccctaccggtgtgaataagggttggtggttgcggtccaccttaaacgtagtatgcattgggcttggtaaaacaccgctcgtagtacggaacgccgcctttaaagacacagtaggcgtagccggcgggttgacaatccatacggggggtggggtgtggtcatggatctgtccacaccaccttcatgcggccctctaagcaagccataccggggggaggcgcgcggcaccgcactgccgggcaaggggaagaaccttcgggtgacccccccccaaccaccgtccgatcaatgctaatgttgcgtttaggcgtgacaccggcaca

SEQ ID NO: 564 - DNA, 537 bp, Pegivirus K
agaatggtgtgatccgtcgccgctccagcggaaagcgggcgggatctagtggttagggttgttcgcgtaaatcccacactagtggtacgctcgtataacgtgggagcagccggtggggtcgaccccccacctggcggctgctgagcaccggacgaagcgcggggggtgaacgctaacccgcggcccgggctgccaacgttaggcacgtcttggctggaagacgttaaacacagggccccccctcaaccctgatccgaggccagagaccaaggtacgccgcccttttaaaggcgttactcgtccaataggatctctccggcgggttgtcaaaccttgctggccctggtgatggttacgggagggggtggggcggggagtagaagccccgcccggcatgggggtaccaagctcggcacgcccagcacgcgtggcgtaggggaaaaatccttcgggtgacccctggtaccataaagtaattaacatgagcatgccgctagggtgtgctttttcttccttccttgggaaggcggtggcacc

SEQ ID NO: 565 - DNA, 617 bp, Unknown
  Description of Unknown: Theiler's disease-associated virus sequence
tgataccgtgtcccggtacgacctcgcgcgtccccaagctcgccctgaggggggagcgtaagggcgcgtagtggggtagccccccaaaccgagccaccctagtgagtgactttagaatggttagggagactaccgccttcgctgtttggggacctaatgatccgcgtgccagggttcttcgggtaaatcccggcgcggtgttttgggttcagggcagtaggggcagacgggccagcagtcgctggttcctggtaccaccaccctatccggacgacctccctcacgaaaggtcgccacggtctgtggctcgacgacgcctataattcagtccgaggggcgcagccctcgttaaacttaggcaaggttcctcgccattgatttggccaggggtttaagtgaacgccgcccttttaatgtttaatagggttctttcccggcgggttgacaaacacttccctgggctcttcgttggcctcggttccttgatgcttcggcacccatgagcgcacaggggggggaccctgcgacagtccgccaagaggaaaatccttcgggtgacctcgtgcgcaacccaatcccttcttcttccacatggcgtgtctgtggtgcatgctgtg

SEQ ID NO: 566 - DNA, 349 bp, Pegivirus sp.
ggacttcggtccccctgttactctgcgagccaccgcagagccagggttggtacgcccgaggtgttagaccccggccgaaagctcctaaccatggggttagtaggacgtggtaaatgccactgaggggttggagagctggtagagcgagtaagtcggcgtaaggcccgagtacgggcctcccagcccgggtcagcctaaacctggctgtgatacccggtgcatggagggcgtgtcccaacgctcgatcgctgtagggtgggtccctgcagttgggtgtggctaccctgctcgtactgcttgatagagtcccggcggacggaccagctctcgtcagtccgtggagttgcac

SEQ ID NO: 567 - DNA, 327 bp, Pegivirus sp.; identical to SEQ ID NO: 35

SEQ ID NO: 568 - DNA, 436 bp, Unknown
  Description of Unknown: GB virus C/Hepatitis G virus sequence
cccccggcactgggtgcaagccccagaaaccgacgcctatctaagtagacgcaatgactcggcgccgactcggcgaccggccaaaaggtggtggatgggtgatgacagggttggtaggtcgtaaatcccggtcaccttggtagccactataggtgggtcttaagagaaggttaagattcctcttgtgcctgcggcgagaccgcgcacggtccacaggtgttggccctaccggtgggaataagggcccgacgtcaggctcgtcgttaaaccgagcccgttacccacctgggcaaacgacgcccacgtacggtccacgtcgcccttcaatgtctctcttgaccaataggcgtagccggcgagttgacaaggaccagtgggggccgggggcttggagagggactccaagtcccgcccttcccggtgggccgggaaatgc

SEQ ID NO: 569 - DNA, 393 bp, Pegivirus sp.
agaatggggagttaactcctggcactggcccgaagcatgaactgatcgcggtggcagggttcttcgggtaaatcccggccgcgtgttgtgattgtgttagggcaggtgacagtcggcagggtcgaccccctgcttcaggaccactgtcttcctggacgaccgttgctgaaaaagggccgccacggtctgtagctcgccgacgcttctaattcaggccggaggaccacgctccgtaatcgagcccaagtactcaaaccccagcacccctgggtcacgccctacgccgcccttttaacgcttcggctaatagggtctatccggcgggttgacaaagggcgcagggttacctggtactacgagcttgggtgtccctgggagtaatcccagggtgcc

SEQ ID NO: 570 - DNA, 343 bp, Flavivirus sp.
atataaatcccagtttggttaaacctatttcaaggcttaagttgtttattattttatcgccgctcgtgactataaagttgcctagcggagagagataaagaagaaggagttcaaggctcagggcagggcgcaagttccctggtccctaggccgctcgcaggaaggaggagtgaagaagaagaaagagaaggagaggaccaccgccgaaagaaggcaggtgcctcacaagagggccaaccagcgtgttggaccagtggccaacgccggacggcgtggtggcctgctgggacgcctggggattggatggagtgccttcctacaggaagacatcgttcaagccatc

SEQ ID NO: 571 - DNA, 104 bp, Unknown
  Description of Unknown: Bussuquara virus sequence
agtatttcttctgcgtgagaccattgcgacagttcgtaccggtgagttttgacttaacgcagtgagaaaagttttcgaggaaagacgagaagcgaattctctga

SEQ ID NO: 572 - DNA, 106 bp, Zika virus
agttgttgatctgtgtgagtcagactgcgacagttcgagtctgaagcgagagctaacaacagtatcaacaggtttaatttggatttggaaacgagagtttctggtc

SEQ ID NO: 573 - DNA, 150 bp, Yokose virus
agtaaattttgcgtgctagtcgctgagcgtcagaccgcaaagtgagtttttagtgatctaaagtgaggagttattcttactgtcatcaaacactacaaataaacacgttgaaattatttccggaagaacaactgtccggaatcaaagacg

SEQ ID NO: 574 - DNA, 118 bp, Wesselsbron virus
agtatattctgcgtgctaatcgttcgacgttagtccgtggagtgagcttctattagagtcgttaacacgtttgaataatttctactgaaaggagtagaagaaaggagattcattccca

SEQ ID NO: 575 - DNA, 389 bp, Hepacivirus sp.
acctccgtgctatgcacggtgcgttgtcagcgttttgcgcttgcatgcgctacacgcgtcgtccaacgcggagggattcttccacattaccatgtgtcactccccctatggagggttccaccccgcccacacggaaataggttaaccatacctatagtacgggtgagcgggtcctcctagggcccccccggcaggtcgagggagctgaaattcgtgaatccgtgagtacacggaaatcgcggcttgaacgtcatacgtgaccttcggagccgaaatttgggcgtgccccacgaaggaaggcgggggcggtgttgggccgccgccccctttatcccacggtctgataggatgcttgcgagggcacctgccggtctcgtagaccataggac

SEQ ID NO: 576 - DNA, 445 bp, Hepacivirus B
accacaaacactccagtttgttacactccgctaggaatgctcctggagcaccccccctagcagggcgtgggggatttcccctgcccgtctgcagaagggtggagccaaccaccttagtatgtaggcggcgggactcatgacgctcgcgtgatgacaagcgccaagcttgacttggatggccctgatgggcgttcatgggttcggtggtggtggcgctttaggcagcctccacgcccaccacctcccagatagagcggcggcactgtagggaagaccggggaccggtcactaccaaggacgcagacctctttttgagtatcacgcctccggaagtagttgggcaagcccacctatatgtgttgggatggttggggttagccatccataccgtactgcctgatagggtccttgcgaggggatctgggagtctcgtagaccgtagcac

SEQ ID NO: 577 - DNA, 379 bp, Hepacivirus I
cagggtttcgaccctggcccggatacctatcgccttacgccgaaaggtaacgagtaggagtcgggtccccaggcccttaccgccaccaagccaggtggggaggtatgggagccggggggtgcagctggtagctccatgggggacgccccgtgagcggatgctgcatcgataccgggttagctctctgggagagcggcacttgacaccacgaatccgggaaccggacaatcgccggcgtgggacgcgttgcctccgtggccgagcaatttggcatgcccgtggtgaagagtgatggtgggggggggccccccttccagtaccgtactgcctgatagggtcttgcctcaagcccagagagtcgaggctgaaaaccgccatc

SEQ ID NO: 578 - DNA, 557 bp, Hepacivirus J
gccgctcccgaaagggagtccggcgcgtcatcccactccgaggagtggggtggcgtccccgtgtgccggggaaccatgaagcctaagggcatccacattttagaatgaacttgaagcttcgtttcgctggccggaaagtcctgggttcccatggccagggttccgcaggtgggtaaatcccggtggggttccatccaggatatacggcaggcgggcgtagtccggcggttcggacgacgtgtgggtcgcctacggtggattgttcacaggatgggcactccggtgtgaataggccccgtcagggtgcgctgacgttaaactcaggccttgcctggtgttcggggaggattgcagggccacgccgcctctaagggccgtatggcacagtacttcttcgggcgggttgtcaaggccctccaacgcgacaccagtgcctcggcaggcatggggccacccagctcggcgtcccgcacacagacggcgtaggggaaaatcagcaatgtgaccccgggtggcattttccttctctctacttccatgcatgatcaaccgcaatc

SEQ ID NO: 579 - DNA, 280 bp, Hepacivirus K; identical to SEQ ID NO: 49

SEQ ID NO: 580 - DNA, 675 bp, Unknown
  Description of Unknown: Icavirus sequence
cgaagtttaagctaagcaccctcgggcgttcccggattatgtgatcacatcaatttgatggctggtcaccacgcaacgcctggagagatactcttacttttctcttaagatccccggtcatttgacgcttgtaggatgatagggttattttccactataaatactttcatactcttggatgttctatatccaagacgggaggacctaccccgtaccccttagaggtgagatgccaagaacaggccctttctgttctctcgacaatggcatcataggcaacaagcatcacaccaagattgctaagttttgttaagagttcttcaagctatagggtggctgtagcgaccttctgatgcctgcggatttccccacggagcgatccgtgccacaggggccaaaagccacggctaacgcccatcaggagcggcacttaccccgtgccccacccttgaaacttgaatgttcacactggcttctctcggctttctgaactgtctgcttgttggggccccgaaggatgccctggaggtaccccattttatgggatctgaccaggggacacctcagctctctaagttgctggtgtttaaaaaacgtctaagggcccccaccccttaggtggagggatccacctttcctttattttttaaaactcttttatggtcacaattgttt

SEQ ID NO: 581 - DNA, 113 bp, Unknown
  Description of Unknown: Antarctic penguin virus A sequence
ctaggagactacgcagtgggataagatgactatgatgtcgtacgggcagaagccagtacagtcgaagtcgagaccgacgtcgaggatttgactctgcctgacctagtgccatc

SEQ ID NO: 582 - DNA, 214 bp, Unknown
  Description of Unknown: Forest pouched giant rat arterivirus sequence
tattggatccgcctccgggcaaaggttactttcttgtacctcggcttagccacagggtgaccccttgtacgtaggggccccgacgtagcactggtctgacaacaccttctcggcatttcaccttctgcccgctcttccgggcggtggtgtcaagaagcagcagtgctcttctcttttcttcctgcagttcaccgagccctacggggggtaggtg

SEQ ID NO: 583 - DNA, 561 bp, Avisivirus sp.
cattcccctttccccagccatgggttaaatggcccctcaccaggttcggtgctgtctaggcttccagtaaagaagtcaaccgagcattgaacaaaacctcagtgggtatggtagttaaccccgtccactggacaactttgtcctcttaaaagtggatcaatccaccccaactccccccctagccacctgagccatggtggatagcagtgacgaaactagggaccccaatacctctagtgccaagagaattcccccctcgcgagaggtgctcttgggcccgaaaggctagttggcagggtgaagtgaaggaagctgctagcgtggcaaccttaagcgtagcccgaagctgaccttagaggttaaccctagtggaccactggatgaagctgtggaggtggtggataggaaagttggccacttgtgagtagatgcccagaaggcataaggctgatctggggccagtgactataccgttccggtaaacctggtataaaaaccatgaaagcaagtgggtttaaaatttcttctaattccttcatttcagtagtgataactggcaga

SEQ ID NO: 584 - DNA, 134 bp, Unknown
  Description of Unknown: Avian paramyxovirus penguin sequence
accaaacaaggactagataacccacgtgaccgttaactggaaaataagatgttgtaggggcgacctagttggaattcgaccccggctccgaaacctctaattgtggttattggcagtctagtctacttctaacg

SEQ ID NO: 585 - DNA, 121 bp, Unknown
  Description of Unknown: Newcastle disease virus sequence
accaaacagagaatctgtgaggtacgataaaaggcgaagaagcaatcgagatcgtacgggtagaaggtgtgaaccccgagcgcgaggccgaagctcgaacctgagggaaccttctaccgat

SEQ ID NO: 586 - DNA, 302 bp, Bat Hp-betacoronavirus
ttaagcttcggcttgttgcataggaccggaaaggtactatctaccctaactcttgtagttagactctctaaacgaactttaaaactggttgtgtccttcagtagtctgtatggccattggaggcacaccggtaattatcaaatactaagaagattcatagtacatccttgtctagcttttggttggcagtgagcctacggtttcgtccgtgtcgctcacaattatccacacagtaggtttcgtccgctgtggttgagttgctagtccgttgctgtttcgtcagccatctacaactcgacacc

SEQ ID NO: 587 - DNA, 458 bp, Unknown
  Description of Unknown: Basella alba endornavirus sequence
ggaatatggctaatcggcttattctaatcaaacgcaaaagacttatgacacagaccggacctgaacgaggtgataaaacacctcgttcaggttcaaaacgtagaagattcattcctccgattagaaatacaactacgtctaagcacgatagagatggtatcaagatcggttttagaccacgagaaaatcggcaaatgaaagtacaagttgggtggtttaaattaccaagaacagtaacattcaagaacaacggcaacccgtttgttacctcatttcgtaaattgtttagaagtaacaaagataaattatttaatggtgggaagaacctaagtacagtaccagccagaagtagtgaaatgacagaaatgtttatgttcatgtccacgctagagggccaattgtcaatccaagatcgagatccaaaaataatcaataagtctatatacatgatagaggta

SEQ ID NO: 588 - DNA, 675 bp, Ball python nidovirus
ccccttcacccataggcactaggagaacaggataacccctaacggggcatcctgcctgtgacctttcagattcgctagttagatatcttcacagactctgctaggcttctgacccagtccgttcccaaagtccgttaccgcccgagtagcgcttaggcgcgaaagggacggaagtacctccagtaagcgaaagctgaagtaagggaaatacggcaagactaacttgttagtcttacagtgtggataacctggtagttatccccgacaagagacctgactcgatgtgaaaacatccaactaggttggcttcaaactagctacaggcaggatatcccccaacggggcctccaaggaatcgagaaccaaccctcattccacgtctgtagtaagcaaaaacaggggcgatcttcaccgacacctctcaccacagagcacaccaacctctgtgaagccaatttcctcgtccaaggacaggttattgagggtcaactttcttccgaccagaagaagggatttcctaccaaaagaaaaaccaaatccaccaacaccacaaggtaaaacaacaacttgtgaagccaatacttagtcaaagactaactattgagggtcaactttctcttcaatagagaagggatttcctggtaaaacaaataacaacaactaacatcagcaact

SEQ ID NO: 589 - DNA, 150 bp, Sapelovirus sp.
gacaggtgttttggagggcggatgacgatatctggctggccaccagggaataacggcaaatgtctgatcatacggttcacaagtctaccggcgatagtggttcaacaccatgtgtagcagggattcttgcgtatgtgaaggcgacagtgc

SEQ ID NO: 590 - DNA, 496 bp, Unknown
  Description of Unknown: Bat Picornavirus 3 sequence
taagcggaaagcattcttgtcccccggtcagtaacctataggctgttcccacggctgaaagggtgaacatccgttacccgcctcagtacttcgagaaacctagtacgcctgatgattccaaattggtatgatccggtcaaccccagaccagaaactgtggatgggggtcaccattcctagtatggcaacatacaggtgtccccgcgtgtgtcacaggcccttacgggtgccatttcggatgagtctggccgaagagtctattgagctactgttgatacctccggccccctgaatgcggctaatctcaaccccggagccactgggtggtgaaccaaccacttggtggtcgtaatgagcaattctgggacggaaccgactactttggggtgtccgtgtttcttttgttcatattaaactgttttatggtcacaacacaacttggtacgatttgtgattattcactgctcacttgtcacagtaaatatacacaatcatc

SEQ ID NO: 591 - DNA, 419 bp, Unknown
  Description of Unknown: Bat Picornavirus 2 sequence
gggttttacgaaacccgtatacaccagaccttttctcccctccccctccacctaccttttccccctctttggaccgaaacaaggacacgtaagtggaaacgcgattttatatgtggttggccaccacggaataacggcaattgtctacatgtgggaagtgcaacctccctagccgataacccctgaccgggtgtgtaggataggaaaggtgcccactgtgggcgacaggttatggtagagtggatacctagccaggggcaatgggactgctttgcatatccctaatgaagtattgagatttctctgctcattacccggtgatggttgtgtggggggggccccatacactagatccatactgcctgatagggtcgcggctggccgaccataacctgtatagtcagttgaattcagccaag

SEQ ID NO: 592 - DNA, 410 bp, Unknown
  Description of Unknown: Bat Picornavirus 1 sequence
gaaacccgtatacaccggaccttttctcccctccctctccacttacctttttcccctcttcggcatgaaacaaggattattcaagtggaaacgcgatttaatatgcggctggccaccgcggaataacggcaattgtgtatctgctggaagccaagcctgcctagccgatagcccttgaccgggtgtgtaggatagcccaggaaccagcaatacgcgacaggttatggtagagtagatacctagccaggggcaatgggactgcattgcatatccctaatgaaccattgagatttctctggtcattacccggtgatggttactagaggggggcctctagtactagatctatactgcctgatagggtcgcggctggccgaccatgacctgtatagtcagttgatttgagcaat

SEQ ID NO: 593 - DNA, 675 bp, Iflavirus sp.
acgaatcggtatacgcttcggtacctattgttgcaagttcgttccctattttcgatttgcctgcccgaatttgactcaaacaattgtgacatactatgtctctgtttgaaagcactacacgagtttgcgcccagcatgtatgttttcaagtcttttgtataagtctgcctctatagtggttttctttgaccttaaagccttgtcaaccatcctatatgctgcatcgagacttgatgtcaatctgcctctactacgcaaatgtctagtaattagttataaggttttactattttccctcatttccaattttagtttgtagtgtatgtgagtatcattcttactccgactgttaagagaaaccaatttatagtcgttaaatatgataaatggaatgaatgatggtgtcattttaaaaacactcttctctataggcgtaagcattctcgctcttagagtcgtaaagaagaaatgccgtgtctatcagtatgttatgcgatttattttctgccacgcgcttctagtgcaatctagttgacatacagacattgcctaccactcgcgagggtcgaccggtagtgtaaggagtaagtgatgatttccgcttattctgtaccctttgcctggtgaggacagatcctgactaattttaaatataaatgaacactagcttccaag

SEQ ID NO: 594 - DNA, 210 bp, Unknown
  Description of Unknown: Bat dicibavirus sequence
gtatagcaccggaatggtattttactactccaagtatacgtactaggagttaaaccctgtaatttacaggggatttagtgacttttatccgtaaaagtcgattggacgttaatcggtaacgaggccaagtaccgtgaaccaatttaaaaacgtattttctcatgtggtagaaccaacttggaaatagcatggcatataggttgtttaggg

SEQ ID NO: 595 - DNA, 212 bp, Betacoronavirus sp.
gataaagtgtgaatcgcttccgtagcatcgcaccctcgatctcttgttagatctaatctaatctaaactttataaaaacactaggtccctgctagcctatgcctgagggtttaggcgttgcatactagtgtcttaggaatttgactgataacacttccctgctaacggcgtgttgcactctcagtctaagcctcccacccataggaggtatc

SEQ ID NO: 596 - DNA, 277 bp, Betacoronavirus sp.
atttaagtgaatagcttggctatctcacttcccctcgttctcttgcagaactttgattttaacgaacttaaataaaagccctgttgtttagcgtattgttgcacttgtctggtgggattgtggcattaatttgcctgctcatctaggcagtggacatatgctcaacactgggtataattctaattgaatactatttttcagttagagcgtcgtgtctcttgtacgtctcggtcacaatacacggtttcgtccggtgcgtggcaattcggggcacatc

SEQ ID NO: 597 - DNA, 675 bp, Cardiovirus sp.
tacgatcgctgtacattccactactgccaattagctcccccttcccgttgctcccctctataaggagagccttctcttgcaaaggtgaagccttcacccccggtcgaagccgcttggaataagacagggttattttctcctctcctcggcgcttgcctcttctaagctgaataggttctatctattcaggcggatggtctggtccgttccttcttggacagagtgtgtatctgggttttccggatctcgaccacacactcaccagagctcaggagtgattaagtcaaggcccgatctgcggcgaaaaggaaatgaagtattttgcagctgtagcgacctctcaaggccagcggatttccccacctggtgacaggtgcctctggggccaaaagccacgtgttaatagcacccttgagagcggtggtaccccaccaccctgcaaattatggatttgacttagtaactaaaagattgacttggcatacctcaacctgagcggcggctaaggatgccctgaaggtacccgtgttgaaatcgcttcggcgaccatggatctgatcaggggccctgcctggagtggttctatcccacacagcgtagggttaaaaaacgtctaaccgccccacaaagaccccggcagggatgccggtttcctttttaccaattcttgacact

SEQ ID NO: 598 - DNA, 675 bp, Unknown
  Description of Unknown: Breda virus sequence
atcacctagtacttacaagcgggtcaaaccgccctccggaacggtcataaccccctcccgaacgtgcgcttgacgtgactggtctttcagtctagctttctgagaaatactccggggttgtaacccaccattttgacctttggtcagtttggtaacactccaaccaaacagcatctgacccacctccagcttgctgcaggccatttggaccaaacgggttcagatatcttgtggctaaacctctgacccacctccagtttactgcaggccttttggactaaacgggtacagactctttgtggttagtttttaactacccactgtttagccgccaacctgatttttattgttacaaaattttgtgtttacacattattttcttacggttggcagtttgtttggttgtttgcacagtttttgctgataccaatttttactgtgcttttggtgttttcggctaaggctgtttttcacatacttagtttgcttgaagtaaccttcacaacatctgttttgtttttggtttctaaggtaaagagtttcaggaaaaaacataggcgcccatcttgtggtgtctagttttaattaatctggcaaacaagtatcaagtcatcgactccctttggagtgagacttacgagtaccaattcgcctattttggccatccatataaaa

SEQ ID NO: 599 - DNA, 383 bp, Unknown
  Description of Unknown: Bovine viral diarrhea virus 3 sequence
gtatacgcccagttagttcaggtggacgtgtacgattgggtatcccaaattaataatttggtttagggactaaatcccctggcgaaggccgaaacaggttaaccatacctttagtaggacgagcataatgggggactagtggtggcagtgagctccctggatcaccgaagccccgagtacggggtagtcgtcaatggttcgacgcatcaaggaatgcctcgagatgccatgtggacgagggcgtgcccacggtgtatcttaacccaggcgggggccgcttgggtgaaatagggttgttatacaagcctttgggagtacagcctgatagggtgttgcagagacctgctacaccactagtataaaaactctgctgtacatggcac

SEQ ID NO: 600 - DNA, 537 bp, Bovine rhinitis A virus
ttttgcggctctgccgccgttcgggttttacctgttttcacagagcaaaacaggacctctagtttcgtgcttaaacgagatcatgctcgaactagaactataacgctggtcactggacccgtgccgcgccttgcggatctttgcgggaatggtggctagtgggctgtggaagtgactctaaccacacgcccctcaagtgtgggaaaacacgaactggtgtagcgacgacgataggccttgggacaccctctccagtgatggagacccaaggggccaaaagccacgccttgtgccctgtcgttcacaaccccagtgcagttcgtgccagtacctgcttttgggaagtgtgctttggacagctgaaaacagtcctagtgggagactaaggatgcccaggaggtacccggaggtaacaagtgacactctggatctgacttggggagagcgggtctgctttacagacgccactctttaaaaaacttctatgtctcgtcaggcaccggaggccgggccttttcctttaaaacaatacacttt

SEQ ID NO: 601 - DNA, 248 bp, Unknown
  Description of Unknown: Bovine picornavirus isolate TCH6 sequence
ttggatctgagcaggggccccctttgggttgctttacaactcaactgggggttaaaaaacgtctaacccgacacgccagagggatctggtttccttttatttcttttactcaccactggatgcagattgacgataaacgttgttgtttgtgactattgacttgatctgcttctacgggtttactttcactgttatacttcttgctttgtttggtgttcactgtactttgtctccttctacatttcaca

SEQ ID NO: 602 - DNA, 486 bp, Bovine nidovirus
caccaatagattagtcaagctgtctataggcataaactaacccccaaccccattaccccggggccaggtgggccgccgccttcgggcaaacccgtgcgctggtataatcaaggttcacagccagattcactgccggttagctagtggggcggtagcctggcaaaacccgaagaggttggaaagggaacttcagggtagtttatcctaggctagcgtagctacagttcggtcaagataaccgtcctggtgctagggctagtagagacagtggtaacttggacaagggtccagggccactttagggaataccctacggaaggctaggtccgtaaggaagacccccgcagttgtccgcggttgagcagagctcctgcgtagacaaaaggcaaaaagtggattacattcgcctgcaggaaaaggcaaacgtcgttggagtcggagctaaagtactggacgattgataccacgcctgctgcggtagataaa

SEQ ID NO: 603 - DNA, 293 bp, Hepacivirus sp.
ccatcgacactccaggctcacggattaagttaggttccgccgaagcgggctaaccaggcccctagtaggaggcgcctatcccgtgagccctttccccacggattgagtggagctggagctgggaaggaccgagtacggtccaatcgagaagaaccctgatgaacattccaggcctcttcggtagatttggatatatccaccagtgaaggcggggtcgtgggtacaggccccctagtccacacagcctgatagggtcctgccgcaggatccgtgggtgcggctgtacatgtacc

SEQ ID NO: 604 - DNA, 472 bp, Mitovirus sp.
gccccgccgaccttcctatttatttctaaataggaaggtcccgactagtcggataattcggtttaacgaattatggttagatctattaaagttaaaatagattgaatttctttctcatcctccttattcctatactttgggagtaaatgacaaatgtctatcctcaaaccgaaatggcttaagtgatgaatttgaaagaaaggtaggttttaagaatataaggcatcaatatattatacccttgaatgttaagtgaccacggcgtgacgattagggctatcttaggatagacagccatctaacgcgacagcagtggaaatcagcttagcatctcaagatcatgtataatatatacataaccttacaattataaaaccaaaccaaaacacactataattttatataaattatagaagtatcggacctggacggtacctactattaactgatagtagccaaatgcaggaagctc

SEQ ID NO: 605 - DNA, 315 bp, Mitovirus sp.
ggaacttttcagttccagaagtggctttattaagccttcaaagtttacactttgaacctgcgattaattccccatagtgactcttgttactgtgaattaggaatagttgtagttcaacttctaatgaggtgaacaatataataactcatcttattaaccctatacgtagacaattgtccaaagagacagttggaattctgccaatctggaatgtttggtacgcgtagaagataataagagaccctctattcccctgcctcatgactaagtcatggcccggggtgtaatagagatacttttatatattatacaatc

SEQ ID NO: 606 - DNA, 675 bp, Unknown
  Description of Unknown: Canine picodicistrovirus strain 209 sequence
cgctctttatacaaatctgtcaaccctttgtataactctaagccgaacaattatagctaggctttttattatataacattaattaggcattagcgttgtcgccaatctcttggtaatcctaaggatacctttcctgttgactaagatgaagcgccttcggttaccgatgcccggtgtccacgaagccatcgtggtcggccgcgtcccccacctctcccaacttggactccatgttttcagtaggtgtaatgattagtattattgattctgctcgttcaatgtgtttatcttcacgatctgggacccaacacatgcttcactcatgtttaaatgttggttccctcattttgaagacacccaaaccatagagtgcgagaatgaggatttctacttccattctggtaacagaaatgaattcctgcgtgtgtctcgtaaatggaatctttaagaacttcagataaatcgaacaatacactaatacaagttgttttctaccaacatgttcaatgcggctaatctgaccgtggagctgtgaagcgctcaaacccgagtgttgtatacagtcgtaatgcgtaagtccatgaggaaccgactactgttacctctgttggtgtgtttctcctttcctctcttttattattatttgttattgcaaatactacaactttgatcaac

SEQ ID NO: 607 - DNA, 107 bp, Canine morbillivirus
accagacaaagttggctaaggatagttaaattattgaatattttattaaaaacttagggtcaatgatcctaccttaaagaacaaggctagggttcagacctaccaat

SEQ ID NO: 608 - DNA, 601 bp, Kobuvirus sp.
tttaagtgttgtgcccaatctcttgactcctgctggaaccaccgaccagtagtgtccaaaatgccaggtggaaaatcctcccttcccctctgggcttcatgcccggcatcctccccccagcctgacgtgccacaggctgtgcaaagaccccgcgaaagctgccaaaagtggcaattgtgggtcccccctttgtcaaggcgtcgagtctttctcccttaaggctagtcctgtcagtgaactctgtcgggcaactagtgacgccactgcatgcctccgacctcggccgcggagtgctgccccccaagtcatgcccctgaccacaagttgtgctgtctggcaaacattgtctgtgagaatgttccgctgtggctgccaagcctggtaacaggctgccccagtgtgcgtaattctcatccagacttcggtctggcaacttgctgttaagacatggcgtaaggggcgtgtgccaacgccctggaacgagtgtccactctaataccccgaggaatgctacgcaggtacccctggctcgccagggatctgagcgtaggctaattgtctaagggtattttcatttcccaccctcttcttcttgttcata

SEQ ID NO: 609 - DNA, 291 bp, Alphacoronavirus sp.
cttaagtgtcttatctatctatagatagaaaagtcgctttttagactttgtgtctactcttctcaactaaacgaaatttttgctacggccggcatctctgatgctggagtcgtggcgtaattgaaatttcatttgggttgcaacagtttggaaataagtgctgtgcgtcctagtctaagggttctgtgttctgtcacgggattccattctacaaacgccttactcgaggttctgtctcgtgtttgtgtggaagcaaagttctgtctttgtggaaaccagtaactgttccta

SEQ ID NO: 610 - DNA, 623 bp, Cripavirus sp.
gcaaaatcggtagtacgttaaacgtacgaccaccgatgagactgaaatgacactagttgagattatttcaatatcctagtgttataaagtcaatatttgttggttgatcgtttcgtcaatcgatggcgctgacagccggaaagacggcaataataaaaaccaagatttagtttttaagttttgattgaattgcaaaagctatcttgaatagacaatcaaaatattaagtaaagcaaaagcttcttaaagaagacaatatttaattagttagtaaccaaacctcatcgtgcccctaagggttaaccggttacgtaaaagcgtagaggtattaaggtcactgcggagacctaaaatccgcaattttatgttttgtaatgttttagttatagacttagatgtaactataagagtttataaatacttgtttcaagatttatagacaagatctgatcctatggattttagataaccttcatgttagtggatagtgtgtgtacctatctaaacgcataaggctcttatttcatatttaaagtaggactatgtattacggcgcatctaacggtaacgttagtcaagaccggagaatctcggaatgaattttagtaattcccaaatttata

SEQ ID NO: 611 - DNA, 675 bp, Unknown
  Description of Unknown: Human coxsackievirus A2 sequence
acctttgtgcgcctgttttatatccccaccccgagtaaacgttagaagttacgcaaccccgatcaatagtaggtgtagcactccagctgcatcgagatcaagcacttctgtctccccggaccgagtatcaatagactgctaacgcggttgaaggagaaaacgttcgttacccggccaattacttcgagaagcccagtagtgccgtgaaagttgcggagtgtttcgctcagcacttcccccgtgtagatcaggctgatgagtcaccgcgatccccacaggtgactgtggcggtggctgcgttggcggcctgcctatggggcaacccataggacgctctaatacagacatggtgcgaagagcctattgagctaattggtagtcctccggcccctgaatgcggctaatcctaactgcggagcacatgccctcaaaccagggggtggtgtgtcgtaacgggtaactctgcagcggaaccgactactttgggtgtccgtgtttctttttattcttataatggctgcttatggtgacaattaaagaattgttaccatatagctattggattggccatccggtgactaacaaatcgctcatataccagtttgttggttttgttcccttatcacatacagctcataacaccctcttatatttactacaattgaatagcaagaa

SEQ ID NO: 612 - DNA, 436 bp, Unknown
  Description of Unknown: Coronavirus AcCoV-JC34 sequence
agaaacaagtagtgttttaaaaaccttcaaattagtgcctgtaacatctttgcaatgaaagtagcgctcactagcctctatgcaaagaatgttaaaagaaatacgaagcatttaaagaatacaatctatctaggataggtacaattctcctccccctcttgacttcggtcaactcaactcaactaaacgaaatcccccttgcatggttccgacccgtgtaaggttgtgtatttcgtgcagtcgttgcccttactagtgtaagcgtaacggcatctaggtttgcacgtcttggaggaaacggtgtgtacgtttctagtgtttacgccgtatcggttccggcccgataggtattgcattagacgtcctgggtggttctgcctgcccttgtgtgattcggctgttccgtcagtttggtcacctcacacgtccttaagac

SEQ ID NO: 613 - DNA, 457 bp, Unknown
  Description of Unknown: Chicken picornavirus 3 sequence
gggtatggtggttaaccccgtccactgggcatctttgccctctcagaagtggatcaatccaccccaactccccccctggttacctgagccacagtggactccggtgacgaagctagggaccccaatacctcaagtgccaagagagtccccccctcgcgagaggtgctcttgggcccaaaaggctagttggcagagtgaagtgaaggaagctgctaacgtggtgaccttaagcgtaattcgaagctgacctttgaggttaaccctagtggaccactggaggaatctgtggaggtggtggttaggaaagttggccacttgtgagtagatgcccagaaggcataaggctgatctggggccagtgactataccgttccggtaaacctggtataaaaaccatgaaagcaagtgggtgaaattttctctttttatccttcattcagcagttgatattggcaaa

SEQ ID NO: 614 - DNA, 675 bp, Unknown
  Description of Unknown: Chicken picornavirus 1 sequence
gtggccgacttgcagaacttcctaccgaaccaccacctcacccccataactccttccctctacaccttccgctatggtggttaccactgctttattgccttgactgagaatggccaccccctcgacacctgccccctactgccccaccgcgcaaccttttgcttgtccactcggttggagaggcatgggggccccgttcatatccccagtccagttggtgaccttccccctccccgtccggtagatggtccagagggctttgccgacgccctctatgatgcttgcttgtctttcctccgtcagcgcgagcatgcacttgtcgagcccacggaaacacagcctagcttttgcttctctcaccctgcgtaccctgggcgccttccgctcgagattcgctttgttcgacaccctggcgtccccccaccgctacgtgattttactcgtggcatacaccgccctggcgttcagtacattccactgcctaatttgggtggcctccctcaatctcccgcaccccccattgcgcacgtcatcaccgccgccgctaacgcgatccggcgcggttctcactggcactgtcccctcgtccgccgggtttccactcatggttggcttttcacttattctggttactggtgttccatcctacttcatgatggtcgccatgaccatgac

SEQ ID NO: 615 - DNA, 675 bp, Orivirus sp.
aaaccctcacgagtgcttgtggtaggtcccaggccaatattcttcgtaaggcttggttccaattttccaccactcgtgtttgggttctggcctatggtacccagaggggcggtttgggggaattaactccccctcccctgtggtcctataccaccccacacctctgtgggctttctttactatcttcttgttttccgacttttaaacactaggcaggcgcgcctagtcatacaccgcccggctggtctttccagctcttgtgggcggtgcgcgctggtccatcgtgcccagcgacatagcaccttgtggacacctccgaacgccctcccctgtatggggtggtgcccaggggtttcagtgtggtgacacactccctggggcccgaaaggctagtgtgcaacaggtgaggtacagccagctgcccccgtggctggagggaccaagcttgtgaagcacacctcaccttcttgggggtgggctagtaagtggtgaaagcatagtgtccgtgtcgctggccaacactttgggtcaagtccagccactcagtgagtagatgcccaggaggtacccctagtggatctgacttggggcctgttacttaatgcaggttaaaaactatgaaagctgagtagtgtagcccggctggtggcttctcttccttattcattctatttt

SEQ ID NO: 616 - DNA, 651 bp, Gallivirus sp.
ggttaacttgtttaaccaaggcttccgtgcagggcttgcacgttaggagttcatgttgattcatgctccaatgcccaaaactttgtgtgtttgtttatgtctttcccaaagtttcccccaaggtttcggtactcaaaccttaattcctagtcccatcttttgggccttagtatctaggaaatgtacccgtgccttgacgaacgtaagaaagctgtcttttattgaacggttctaatgaactaagtataactggctcgcgccacctggtgtgtgccgttggaattcccccatggtaacatggtccaacgggcccgaaaggctagtgggcaatcggtcctccaaggaaggggttcccaccccgacctgaacaggatttgatgaagctcacctcccaggctcctaaccccaaggaagtttacttatagtaattagaatttagtatgtaattgctggcaatcttgctagtagtcaggaacgttatgaccaaatgagtagacccccagaaggtaccccattatatgggatctgatctgggcctcatactgtgtgtctccccacatatgaggttaaaaccatgaaagtttggtccaaaatattcttttccttttatcttttctttagtggtgacgccattatatcagcagtttgctg

SEQ ID NO: 617 - DNA, 303 bp, Unknown
  Description of Unknown: Chicken calicivirus sequence
ggtgcatcatcactgaacaccctcgggcagagatgcaagggtggaagtcactcctgccccctggcaacatgcaggtgcccgatcccaagcttagttctgacttcctctcctgggtggtgcaacactccaaggttgatgaacaaacctggagggacctctgggcaacctggtctctcgaggatctccggcgcatctccacagactacctcatgctcccggaacctgagaagaacactgatgcctatgatggctggctgatggtcggcgagatgttgacctttgccggtctcattggctgggagg

SEQ ID NO: 618 - DNA, 524 bp, Unknown
  Description of Unknown: Carp picornavirus 1 sequence
agctacaggaaagagagagataatcacagcacataaatacaactacagaagagagcctttccctgagcactatttacagcaaaccacgctgggaaaagtggtagcatgacccacttacgggttacttagtataggattttaatatcttcgattctttattttcttttcttaactaagttcgcccggactttatccgtgttttattttagtttaagcaaaattgagtaactaagtttttaacctgccaaatggtgagaagtaactctgtgaaaataccatttgtgcatgaaattgtcttgaaaactcttaggcttttggggggtcccactgctgtttggaggactattgacagactctattgtagttgagtagtgactaatgataacgatttgcgtattacgcaatgggctgtacccgttagatttagtatgccggggggaggggtcccactggattgcactatgtaacctgacagggcgtctgccgacgcactacaatgaggataagatcggctgtttttattt

SEQ ID NO: 619 - DNA, 675 bp, Unknown
  Description of Unknown: Falcon picornavirus sequence
cgcttggaataagttgagaggaattatgcatgctagttgtgtttgtttacaactaattgttctaatccaagtgaagctcttcgcttggggcggcacgacacttgccgtaattcttctaccgtccctccacaccttgtggatgaagggccggatgtgtggcctctggctaacccctctctctggggtgatgctactggatgttttactcctagaccaaatcacatgaactcctcttgatccacttcggtggggctatgagcctgcggattaatagctggcgacagctaccccaggggccaaaagccacggtgttagcagcaccctcatagtctgatgcccaagggctgatgttgggagctagtagtgtgtgtctggcctatgtttaggacttctggccaagcgcagaggagtggggctgaaggatgcccagaaggtacccgtaggtaaccttaagagactatggatctgatctggggccccctcacgtggctttaccacgtgttgggggttaaaaaacgtctaggccccaccagcccacgggagtgggctttcccttaaaaagcccaacaatatttatggtgacaattcactgtttcttctttgcaatttttgtattcttggactccttattttttgtttgcttgattttagtggacattcagattcaaatacaaa

SEQ ID NO: 620 - DNA, 675 bp, Unknown
  Description of Unknown: Equine rhinitis B virus 1 sequence
cgacaggcacaggtcgctccgagttctagtagtgtgggaacttgttactactgatgaaacgaggtagtgacactcagtacctgcgaacgaggtcggggccctcccttcttccttcacccaactttcacttttcgttccactttagcaggggtcttctttctatccccctggcggcattggaactagccgtcgcgtcttaacgcgcagccctgaaggccccacaccttgtggatcttgccgtgggtatgtttctggcatgtgtttctcaagcctgcaaccgaagccgaacagccacatgaacagtttgagcgtggtagcgctgtgtgagttggcggtggatccccctcgtggtaacacgagcccccgtggccaaaagcccagtgtttacagcacctctcacatccaggacgaccccatcctggcgctcactcttagtagtatggcttagtacgcattaggtggtaagccgagctctccctcggccttgttctgaatgcacacatgtctaggggctaaggatgtcctacaggtacccgcacgtaaccttcagagagtgcggatctgagtaggagaccgtggtgcactgctttacagatgcagcccggtttaaaaagcgtctatgcccctacagggtagcggtgggccgcgccctttccttttaaaactacttgttct

SEQ ID NO: 621 - DNA, 675 bp, Equine rhinitis A virus
aagggttactgctcgtaatgagagcacatgacattttgccaagatttcctggcaattgtcacgggagagaggagcccgttctcgggcacttttctctcaaacaatgttggcgcgcctcggcgcgccccccctttttcagccccctgtcattgactggtcgaaggcgctcgcaataagactggtcgttgcttggcttttctattgtttcaggctttagcgcgcccttgcgcggcgggccgtcaagcccgtgtgctgtacagcaccaggtaaccggacagcggcttgctggattttcccggtgccattgctctggatggtgtcaccaagctggcagatgcggagtgaaccttacgaagcgacacacctgtggtagcgctgcccagaagggagcggagctcccccgccgcgaggcggtcctctctggccaaaagcccagcgttaatagcgccttctgggatgcaggaaccccacctgccaggtgtgaagtggactaagtggatctccaatttggcctgttctgaactacaccatctactgctgtgaagaatgtcctgaaggcaagctggttacagccctgatcaggagccccgctcgtgactctcgatcgacgcggggtcaaaaactgtctaagcagcagcagaaacgcgggagcgtttctttttcctcatttgtttc

SEQ ID NO: 622 - DNA, 224 bp, Unknown
  Description of Unknown: Equine arteritis virus sequence
gctcgaagtgtgtatggtgccatatacggctcaccaccatatacactgcaagaattactattcttgtgggcccctctcggtaaatcctagagggctttcctctcgttattgcgagattcgtcgttagataacggcaagttccctttcttactatcctattttcatcttgtggcttgacgggtcactgccatcgtcgtcgatctctatcaactacccttgcgact

SEQ ID NO: 623 - DNA, 675 bp, Enterovirus sp.
actctggtatcacggtacctttgcacgcctattttataccccttccccatcgtaacttagaagcaacaaacaaactgcccaatagcagcacaacacccagttgtgttaggggcaagcacttctgtttccccggaagggtctgacggtatgctgtacccacggcagaagtatgacctaccgttaaccggccatgtacttcgagaagcctagtaccattatgaaggttgattgatgttacgctccccagcaaccccagctggtagttctggtcgatgagtctcggcattccccacgggcgaccgtggccgaggctgcgttggcggccagcctacaccatacggtgtaggacgtcaagatactgacatggtgtgaagagcctattgagctacgtggtagtcctccggcccctgaatgcggctaatcctaactccggagcatccgccagtaagcccactggaagggtgtcgtaatgcgaaagtctggagcggaaccgactactttgggtgtccgtgtttcctgttttacttattgtttggctgcttatggtgacaacttatagttatcatcataagctacttggtcttgccaaccggagaattatttggttatttgttggtttcataaacctacagtcgtattttcctgtcttattaattgttctcaaaattaacaaca

SEQ ID NO: 624 - DNA, 675 bp, Enterovirus sp.
taccgctgcaccagtgagctggtacgctagtaccttcgcacggagtagatggcatcccccaccccgtaacttagaagcaaagtacacatctggccaatagtggcgctgcatccagccgcgcaacggtcaagcacttctgtttccccggtccgcaagggtcgttatccgcccagtccactacggaaagcctactaaccattgaagctatcgagaggttgcgctcggccacgaccccggtggtagctctgagtgatggggctcgcaaacacccccgtggtaacacggatgcttgcccgcgcgtgcactcgggttcagcctattggttgttcacctcaacatagtgtaaatggccaagagcctactgtgctggattggttttcctccggagccgtgaatgctgctaatcccaacctccgagcgtgtgcgcacaatccagtgttgctacgtcgtaacgcgtaagttggaggcggaacagactactttcggtactccgtgtttcttttgttttattttgaattttatggtgacaattgctgagatttgcgaattagcgactctaccgctgaacattgccctgtactacctaatcgcatttcacaaaacctcagagataccaagctcttacattgatctgcttgttttcctgaatctcaaatataaattggaacaagcaaa

SEQ ID NO: 625 - DNA, 107 bp, Morbillivirus sp.
accagacaaagctggctaggggtagaataacagataatgataaattatcatacttaggattaatgatcctatcaattggcacaggatttggataaaggttcacagtc

SEQ ID NO: 626 - DNA, 348 bp, Unknown
  Description of Unknown: Dianke virus sequence
tgttttcaaccataatactactactacaagtataaaaccccgtccgtctgtcggagacgctaaactctgaccaccaatctagccacatcagttgcttaaagaacctcttgagacactctcccacttaacatcttttaggaatcttcgatgctacaacaacttggctagtgaacaataaatccgtacaattcacagttgtaagaggccataggtccagactttgaaaggtttgtttctattgttacaaatacttagattaacagaggctatttaatagtgctcatcacgttaacagagtaaccttgtgcaatagtatgagcttgttgtaaaacgtcttgatacgacacc

SEQ ID NO: 627 - DNA, 270 bp, Hepacivirus sp.
cactcaatactacactccgcatttggggagaagcgctggcgttcgcggaaccgcgttaaccatacgcgtagtacgagtgcgacagaccccggtgctactggtggtagcgagacacgagccgaagtctgtggggggaactccacttagagggcatgcccgggcgtaggcttctgagttgggatgggccccaacttggcccctgagtgggggggtgttacgacctgatagggtgcgggctggcgcctaccactttccagtcgtacatgagtc

SEQ ID NO: 628 - DNA, 415 bp, Narnavirus sp.
gcccggggggtgcagtcctgtgaaagggtctgcaccatactatatatgtatatgattacatcccaaaaggcgacttcgttcaggttttaaatctgacgtaggtccagtaaataagcatgtcaaaacatgtaagtttatcctgtaatctactctcataagatgagataagatgatattgcagttcccatgtaaataaatccattatgaattcattcatataaggtagaagtggtaactatggttgaaacattaatataaaacggtcattttgcatgaacgtcattaaggaactggcataccaatgtctatttagtgactatgatatttagagtatcccttatattaattaacaattattccttttagcatatcatccgacaacaaattttaaaagaagaaatattactcattaaaa

SEQ ID NO: 629 - DNA, 675 bp, Torovirus sp.
gtacttacaagcgggttaaaccgccctccggaacggttacaaccccctcccgaacgtgcgcttgacgtgactggttctcagtctggctttctgagaaatactccagggttgtatcccaccatcttgacctctggtcattttggtaacaccataaccaaacaaactctacacacctaacccacctccagcttgctgcaggccttttggactaaacgggtttaggtgttttgtgaccaactcgtctacccacctccagttttactgcaggcctttttggactaaacggctttagacttttgtggttagtttttaactacccactgtttagccgccaacctgattttcattgttgtaaaattttgtgtttatacactattttcatacggttggcagtttgtttggttgtttgcacagtttttgttgataccaatttttactgtgcttttagtgtattctgctaaggctgtattttacatacttagtttggttgaagcaatttttacaacatttatattgtttttgatttctaaggtaaagagtcttaggaaacaccatagacgccattcttgtggtgtctagttccaactaatctggcaaacaagtaccaagtcattgactcactttggagtgagacttacgagtaccaatttgcctatttcggacatccatataaag

SEQ ID NO: 630 - DNA, 675 bp, Foot-and-mouth disease virus
acaagcttgacaccgcctgtcccggcgttaaagggaagtaaccacaagcttacaaccgcctaccccggtgttaatgggatgtaaccacaagatacaccttcacccggaagtaaaacggcaaattcacacagttttgcccgtttttcatgagaaacgggacgtctgcgcacgaaacgcgccgtcgcttgaggaggacttgtacaaacacgatctaaacaggtttccccaactgacatacaccgtgcaatttgaaactccgcctggtctttccaggtctagaggggtaacactttgtactgtgcttgactccacgctcggtccactggcgagtgttagtaacagcactggtgcttcgtagcggagcatggtggccgtgggaactcctccttggtaacaaggacccacggggccgaaagccacgtcctgacggacccaccatgtgtgcaaccccagcacggcaacttttctgtgaaactcactctaaggtgacactgatactggtattcaagtactggtgacaggctaaggatgcccttcaggtaccccgaggtaacacgcgacactcgggatctgagaaggggactggggcttctgtaaaagcgcccagtttaaaaagcttctatgcctggataggtgaccggaggccggcgcctttccattataactactgacttt

SEQ ID NO: 631 - DNA, 310 bp, Unknown
  Description of Unknown: Feline infectious peritonitis virus sequence
acttttaaagtaaagtgagtgtagcgtggctataactcttcttttactttaactagccttgtgctagatttgtcttcggacaccaactcgaactaaacgaaatatttgtctctctatgaaaccatagaagacaagcgttgattatttcaccagtttggcaatcactcctaggaacggggttgagagaacggcgcaccagggttccgtccctgtttggtaagtcgtctagtattagctgcggcggttccgcccgtcgtagttgggtagaccgggttccgtcctgtgatctccctcgccggccgccaggaga

SEQ ID NO: 632 - DNA, 143 bp, Unknown
  Description of Unknown: Farmington virus sequence
acgacgcataagcagagaaacataagagactatgttcatagtcaccctgtattcattattgacttttatgacctattattagacccttcacgggtaaatccttctccttgcagttctcgccaagtacctccaaagtcagaacg

SEQ ID NO: 633 - DNA, 528 bp, Unknown
  Description of Unknown: Avian infectious bronchitis virus sequence
acttaagatagatattaatatatatctattacactagccttgcgctagatttttaacttaacaaaacggacttaaatacctacagctggtcctcataggtgttccattgcagtgcactttagtgccctggatggcacctggccacctgtcaggtttttgttattaaaatcttattgttgctggtatcactgcttgttttgccgtgtctcactttatacatctgttgcttgggctacctagtgtccagcgtcctacgggcgtcgtggctggttcgagtgcgaggaacctctggttcatctagcggtaggcgggtgtgtggaagtagcacttcagacgtaccggttctgttgtgtgaaatacggggtcacctccccccacatacctctaagggcttttgagcctagcgttgggctacgttctcgcataaggtcggctatacgacgtttgtagggggtagtgccaaacaacccctgaggtgacaggttctggtggtgtttagtgagcagacatacaatagacagtgacaac

SEQ ID NO: 634 - DNA, 626 bp, Rhinovirus sp.
ttaaaactgggtgtgggttgttcccacccacaccacccaatgggtgttgtactctgttattccggtaactttgtacgccagtttttccctcccctccccatccttttacgtaacttagaagttttaaatacaagaccaatagtaggcaactctccaggttgtctaaggtcaagcacttctgtttccccggttgatgttgatatgctccaacagggcaaaaacaacagataccgttatccgcaaagtgcctacacagagcttagtaggattctgaaagatctttggttggtcgttcagctgcatacccagcagtagaccttgcagatgaggctggacattccccactggtaacagtggtccagcctgcgtggctgcctgcgcacctctcatgaggtgtgaagccaaagatcggacagggtgtgaagagccgcgtgtgctcactttgagtcctccggcccctgaatgcggctaaccttaaacctgcagccatggctcataagccaatgagtttatggtcgtaacgagtaattgcgggatgggaccgactactttgggtgtccgtgtttcactttttcctttattaattgcttatggtgacaatatatatattgatatatattggcatc

SEQ ID NO: 635 - DNA, 675 bp, Unknown
  Description of Unknown: EV22 sequence
ccttataacccgacttgctgagcttctataggaaaaaaccctttcccagccttggggtggctggtcaataaaaacccccatagtaaccaacacctaagacaatttgatcaaccctatgcctggtccccactattcgaaggcaacttgcaataagaagagtggaacaaggatgcttaaagcatagtgtaaatgatcttttctaacctgtattatgtacagggtggcagatggcgtgccataaatctattagtgggataccacgcttgtggaccttatgcccacacagccatcctctagtaagtttgtaaaatgtctggtgagatgtgggaacttattggaaacaacaatttgcttaatagcatcctagtgccagcggaacaacatctggtaacagatgcctctggggccaaaagccaaggtttgacagacccattaggattggtttcaaaacctgaattgttgtggaagatattcagtacctatcaatctggtagtggtgcaaacactagttgtaaggcccacgaaggatgcccagaaggtacccgcaggtaacaagagacactgtggatctgatctggggccaactacctctatcaggtgagttagttaaaaaacgtctagtgggccaaacccaggggggatccctggtttccttttattgttaatattgacatt

SEQ ID NO: 636 - DNA, 675 bp, Cardiovirus sp.
tccgacgtggttggaattaacatcttttccgacgaaagtgctattatgcctccccgattgtgtgatgctttctgccctgctgggcggagcgtcctcgggttgagaaaccttgaatcttttcctttggagccttggctcccccggtctaagccgcttggaatatgacagggttattttccaaactctttatttctactttcatgggttctatccatgaaaagggtatgtgttgccccttccttctttggagaatctgcgcggcggtctttccgtctctcaacaggcgtggatgcaacatgccggaaacggtgaagaaaacagttttctgtggaaatttagagtggacatcgaaacagctgtagcgacctcacagtagcagcggattcccctcttggcgacaagagcctctgcggccaaaagccccgtggataagatccactgctgtgagcggtgcaaccccagcaccctggttcgatggccattctctatggaaccagaaaatggttttctcaagccctccggtagagaagccaagaatgtcctgaaggtaccccgcgcgcgggatctgatcaggagaccaattggcagtgctttacgctgccactttggtttaaaaactgtcacagcttctccaaaccaagtggtcttggttttccaattttgttgactgacaat

SEQ ID NO: 637 - DNA, 292 bp, Human coronavirus 229E
acttaagtaccttatctatctacagatagaaaagttgctttttagactttgtgtctacttttctcaactaaacgaaatttttgctatggccggcatctttgatgctggagtcgtagtgtaattgaaatttcatttgggttgcaacagtttggaagcaagtgctgtgtgtcctagtctaagggtttcgtgttccgtcacgagattccattctacaaacgccttactcgaggttccgtctcgtgtttgtgtggaagcaaagttctgtctttgtggaaaccagtaactgttccta

SEQ ID NO: 638 - DNA, 282 bp, Unknown
  Description of Unknown: Hubei zhaovirus-like virus 1 sequence
gtgcaggatggcctttcccatcttaagtggtttgtaggatttcgtgggtccataccccccgatttcttggtacgtattccatgcacggagaatacgaccaaaactcttatttcaaaaaatattattttttactcttgtgggctgagtgcgacccaccagttccagcttagcaacctggaagttgttggagatttatggaaccaaattacacatgcgtggagtgccgccactccgtatctgttcactcattacgcgattaagttctgcgacgagacgagcgaa

SEQ ID NO: 639 - DNA, 600 bp, Unknown
  Description of Unknown: Hubei tombus-like virus 9 sequence
ggaccatccaggcaggtgtaggctagtaccctcacctgacctgtcgcgatgtttggctttgtgaggcttgtgggaggatcccttggcccatgcattgctgctgtcatcgtgaaaaatgttgtatgctcgcacctggcgtggaggaaacggcatttgacggatgctaaggaggatttgaaggtcctcaactcccatgccttattacaagtcccctttccttcaagcttcgagcccacgtctgtgacgagcagaggtgaggttggagtcaagaggagtcctattcaagctgttcgcagcaagaaccataaaactttcattgctcaatgggcaagagcggctaaggctcggttctcgtttgcacgacagtgtgagcggagccctgtaaatgtcgcggcccttcatcggtggtttgcatcggagtttaagaaaattggcatgaacttgctccaggtttcgtacgtgatcgatgaggttgttgaacttagtttggaaccaacgtatgagcgtatggtgtccgaaactaagaagcaattccgtcatcgggcacgtatggaatactacaacgagaaaaaatgccttgaaaagatccactaggaacgc

SEQ ID NO: 640 - DNA, 251 bp, Unknown
  Description of Unknown: Hubei tombus-like virus 32 sequence
ttcgggtttacccgcgtaagcggccacactgactggttgtcggtgttgaatttgtataccagatgaggagacgttaccaccgtctcggcagtgctacgtctgggaaaggactgtgatagtggacagtcctaccgtctttagatacattgcgttgtgtatagcccgggagggattaactaatagcaacgcaatgcacacggcggttcggatttgcttgactgatggaaagacatctaagttctaattgaacc

SEQ ID NO: 641 - DNA, 341 bp, Unknown
  Description of Unknown: Hubei sobemo-like virus 3 sequence
gagatgtttgcgtgggccgttgcgctgcgggcggcccacctccctacggggaccgtgagacaccgctggggaaggcccccacccccggccaaggggatcctgccgagaggcaggagaaagaggcccagccctctggggcgcctttaggggtgcctgggagggaagtacccgagccgggcggccggtcgggtgcggctgtgcagttcgaggctaaccgtaaggaaggcctgagctgcctcggcttgtcggaaaggaagacgaaggcacttatcaaggctttcaggaagcaggagcgcaattacagcgcgcgccgtgcggcctggattaaccgcatttggccg

SEQ ID NO: 642 - DNA, 675 bp, Unknown
  Description of Unknown: Hubei picorna-like virus 2 sequence
agcaacttctttctgaaaactagctagagttcgacgatctctctggctaatgacaaataaccaatcaaaaagtcaaatgttcatgtatatatatatttagtagtgacctttatttagaaaaactttagatgatttatcgtcaagttgccctttgtgaagcgatcagctttttatatcgtttcatttttgtatacgtcttaattgacgttgtaagtacgttttgcatacctcacattgaggatagtatcgtttcctgactaagaagttaaactagtctaccaatagcaaccatataggatatagctttgtttttaacaaggtttaatctgatcttatgctcttgcttacggtgttttatgtatagaaaagtttttataaaaactacataattgtcaaaagaaaaagcgttacgtactgacgcatttatgttcacagtgtgacacaaaccttctatattttgattgtaaaataggctttgcctgaccatttatcaaatacaaactgtttcaaacgcctctccgagccatattggccgacgcgaatcgacataacagggtgagtttacagctgcagttgcagccgaggatccacttatttgagagagaattactcttaacgaaattttgaagtcacttctacacagttaagtctgagtaggcgttatccaaacgtaaa

SEQ ID NO: 643 - DNA, 174 bp, Hepacivirus sp.
acatgggggggggctgacagtgagtacactgtgccaagcaggtgctacgctatgcctaggtgctgctgtaggccaaggacatgtcccagtcatcccaggtgagggggggggttcccctcaccgctgccactgcctgatagggtcctgccggagggtctcggtgtccggctgtac

SEQ ID NO: 644 - DNA, 675 bp, Unknown
  Description of Unknown: Harrier picornavirus 1 sequence
gatgtgtgacggtgtaattactttccggatcccactttcctattataactctttcatcccaaggttagggaaagaacctggctcggtaccaccagaccctccgccacgctagtggactctccggagataacggtaccccctttgtagtcacctgtgctggtgaagaaccacctagtattgcttgggtgcgtgccgcctagcttccatttcttctggagcactgtgcaatgaggtttccccacttggtaacaagtgcctcaggtcccgcaaggatactgtggggtggtgtgaccgcagggagctgtctccacggctcctctaatgttacgccgctatccacaggccagtgcgtgtcatcgatcccggatgacagagctagtattgcgaacccccaagtaagaaaagtggctagtaacctgatagctggtgaagagggtgggtcagttgagtagatgccctagaggtacccgaaaggatctgactagggacccgtgactatacattaggtaaaccgggtataaaaaccatgaaaaactgaccacttttcttttaacctcttctttctttttatgtgtgttaagtgttttgagtttggactgtaccttgcccgcctttcttggattttctctatcgctcttcttacacctactgttatcaaggcactctttagagata

SEQ ID NO: 645 - DNA, 500 bp, Kunsagivirus sp.
tttcaaatcggactccggtagttataccggagcccggtttggacgcttgggccgcgttaacagccccccacccctttcccactgactgatttctcggattggactcatttgcattgctaactctgattctggatttccccgtttatgtcgtcgcggtcggaagtgcacgtacttcgacgttgatctgatggcgtttgtttccaggggggaggtggcggcagaaacgcccccgccgtaaacttcggcgggccacgcctgtcaagccactccctggggccgagcgcctgaggtgatacagagagataagcacactgggcgctgacaacgcccgggacctcagtgagaagagcagtagggccgtgtttatgggactccattggatatcccccgcttgtcggaactcacggctactccgggttgggaagcccgcgactggtactgtactgggtgatagcctggtgccttccctctcactgttgtatgaaggctgaaaaccccct

SEQ ID NO: 646 - DNA, 675 bp, Kobuvirus sp.
tatagtttgcctgtttctcgcaccgttaccgctcgttcgggaatgtgaaactggcacccctcctctcccctaccaccctttctccttcgcccccattcataatttacaacgccgcacacagcggcggccgccaagggctagcctggcggttataaaaggaacctgggtctttccctcttcaagccaaaaggtaggttccctgtgtccctgaatgctcggtgaggaatgctgcaccgtaacgctttgtgaagtgtttgcaagttctggcccggcaagcctacagagtgctgtgatccgctgcggacgccatcctggtaacaggacccccagtgtgcgcaacagtatgttcagacttcggtttgttcacttgctttcatggaccattgcgcgaaagtgcgtgcgccatatccctgtacttcaggtgtgcttctctggaccctaggaatgctgcgaaggtaccccgtttcggcgggatctgatcgcaggctaattgtctatgggttcagtttcctttttctttactccacaattgactgcttaactgactctggatcttgtgcttccactgctctttctgctctcaaaacggcttcacttaccaactctcacctttcgaccaacaccatttacacactaacttttttcgactcttctgactcctggcttggtgaagac

SEQ ID NO: 647 - DNA, 608 bp, Kashmir bee virus
tacgtacaattttgacgcttcgttcatgcaacaatgaactcacatgtggcgctcggtagtaaccagaggggcgtcattcccccgtatggagtggagaatataagctaccgactcgagctgtagaataattcagcaacttataacgaacacgaattttagtcgacgaaaccattttagcctttaattctatgatttgattataatgataaacagctcatgtaactgtctaaactacataaatacaactggattacgaacctttaagtaactatcttagatgaagtctagtagtctcccaatatttccgtgaaaagaatgagggacgagatagctctatttaaagacgtgaggctttaaattctgataaatacattacctgagaattcctcctttaggagttagaatttgaaaagattagtacctatacttaatagaatttaaatatgttaataatgctgaagacaagtatttcgattattaacctctatatttctatataaagtatctgtgagtctcagtggacatcacagtaaggtcgcagttaacttgtaatcttttcattcctgtgtcggagcagtggtaatggagccggacgatttcgccaaaac

SEQ ID NO: 648 - DNA, 332 bp, Unknown
  Description of Unknown: Jingmen picorna-like virus sequence
tgtgtttttgtcaagataattgttctgtgattaacagtgattgtggttcgtgtaatgcgacgcagtcaaatgctagttttgatgaagtgtatgagagagtggaaaacttatctcataagaagattgaagagtgtgtagatcaggctattgatcgagcttctaagcttcgtgattacaagcttaatgttcacaatggctcccgacgggaatcatctgatcctctctttatttcgccccattcgttgttatcgcttggggtatctaagtttgttgcgtttgagcagcatcacagtttcgcttcagttgagtctctgaagttgcttgctctgtct

SEQ ID NO: 649 - DNA, 145 bp, Mumps orthorubulavirus
accaaggggaaaatgaagatgggatgttggtagaacaaatagtgtaagaaacagtaagcccggaagtggtgttttgcgatttcgaggccgggctcgatcctcacctttcattgtcgataggggacattttgacactacctggaaa

SEQ ID NO: 650 - DNA, 138 bp, Mosavirus sp.
gaagttgatcatgaacttggttattggtggaacgcacatgaactcccaacaatgatcttgaagacacagcgtggtaacaattaccatgcccttgtggctgcccaagacattgatggctattgggtgatttatgatgac

SEQ ID NO: 651 - DNA, 675 bp, Unknown
  Description of Unknown: Miniopterus schreibersii picornavirus 1 sequence
gttgtcgacccgttgcttggtttaagcatgaggtggattcccccgattatgtctacccgttactatggcgggcggtcgtttcagggtgtttctactgaggactgcaccaagtctttatcttttattctcagatctccggctgtttgacgcttgtaggacagcaggactattttctcttaatctttttctacccactagggtcctatcctagtggagggagggtgccaccccttctctctttagagagtgcgcctggcggtctttccgtctctggaaaaaggagcacatggcatgctacaattggcacaagaaaacaagctttgcggattctttctttgtactagaggaagctgtagcgaccctgtatggcgagcggactcccctctcggcgacgagagcctctcgggccaaaagccaagtgttaatagcacccatacaggcggcagtaccccactgccctttctcaacatacaatgactgatgaaccactgttggtttttctgacacctttgtagtaggattccaaggaatgtcctgaaggtaccctgttagcttacgcgcaggatctgatcaggagtctctttacagtgctgtacactgtgcaagggattaaaaattgtttgaggaatccccgagatagtggtctatctcttcctattttgttttacagacacg

SEQ ID NO: 652 - DNA, 381 bp, Unknown
  Description of Unknown: Linda virus sequence
gtatagcagcagtagctcaaggctgctatacgattggacataccaaattccaattggtgttagggaccacctaggtgaaggccgacgacaggtagccattcctgttagtaggacgaaccgttatggtggactggttgctcaggtgagcaggctgcaatgcgtaagtggtgagtacaccacagccgtcaaaggtgccactggtaaggatcacccactggcgatgccttgtggacgggggcgtgcccaacgcaatgttagcggtggcgggggctgccatcgtgaaagctaggtcttgatggaccttgttgcctgtacagtctgataggatgccggcggatgccctgtgacagccagtataaagaatatccgttgtgattgcac

SEQ ID NO: 653 - DNA, 675 bp, Unknown
  Description of Unknown: Lesavirus 2 sequence
tctttctttattttcttatgtaactcttctttttaagttttattttgcctacttgtgagcttatgcgggaccactgtcttagacaaccccacatttgtcatgagtaagtacacgcaaccattacgattactttttaaccgtctgaccttttgataacaactgaagttaggcgtgaaacatgcatttataccaaagtagccccgcatttccccactacggtgggggggctaccctactggctttggaactgtagccattatgtgttgcctggctttcaggatctcacaacacaacagttctctcacaatggaatatgggtgagattgcagtgacatgaacaagtatctagtagtacatagactcaagcctagttgcctgcggaacaacatgtggtaacacatgccccagggtccaaaagacaagggttaacagccccttctaggtgtctgtgtgtgaagaatactttagtagtgttgttatgatctcacctgttagtacagaatgagtatggcttggtgaaggatgtcctacaggtacccattatatggatctgagtaggagaccactagtggtggctttaccgccaggtgagtggtttaaaaagcgtctagccaagccaacagcactagggatagtgctttctatattttatattttcagtgtatatggtgacaa

SEQ ID NO: 654 - DNA, 675 bp, Unknown
  Description of Unknown: Lesavirus 1 sequence
gtaactaataagcaagttttactgcctgcaaactgcttcaatgggaccaccgcttcggcgacccctttgttgagtttgtatgtttttaagtaatctttgcaaccatacgattattttagccgcctctctataatgatcttgttatagtgggacgtgaaacattggtttttctcacacacgtccggtcacccgggcgtgtgttcttccgtaagtcctatccacataccatcgtgggtaggccagcatgtttgcacaggctgtgacagtgtgggtgggctttccacctctcaacaacacactgaattgcaatgcactcacggaggaaatgacaatttggttatagttttgaactgtgctagtaatttctttcacattaagccatgttgcctgcggaatcacatgtggtaacacatgcctcagggcccaaaaggcacgggttagcagccccttcatggtgtgttagaagtgaaaacacatagtatgagctataatatctttgttgtcttctctgtagtgtaccccgccaaatgtaaggatgcccagcaggtacccattttatggatctgagctggggattgatagtgtatctataaatgcactgatcaatttaaaaagcgtctaagtttggcacaaacactggggacagtgtttttcctttattcttttatttgatta

SEQ ID NO: 655 - DNA, 638 bp, Unknown; identical to SEQ ID NO: 30
  Description of Unknown: Phopivirus strain NewEngland sequence

SEQ ID NO: 656 - DNA, 377 bp, Pestivirus sp.
gtatacgagattagctcatactcgtgtacaaattggacgtagcaaatttaaaaattcggatagggtccccatccagcgacggccgaacggggttaaccatacctctagtaggactagcagacggatggactagccacagtggtgagctccctgggaggtctaagttctgagtacagaacagtcgtcagtagttcaacgctggtaaaccccagccttgagatgctacgtggacgagggcatgcccaagacacaccttaacctggacgggggtcgtccaggtgaaagtacccatctttgggtgctgggagtacagcctgatagggcgctgcagaggcccactgacaggctagtataaaaatctctgctgtacatggaac

SEQ ID NO: 657 - DNA, 494 bp, Unknown
  Description of Unknown: Quail picornavirus QPV1 sequence
tttgcatcagttcgcccctcccctcaccatacctttttcccctctttaggactgatacttggttatgatgagcagaggatttcgcaagttatgcttcttgataaaaagtaattcacgaatcatgggattatagcctggaagtgaacactcatgtggcaagtgggttagtagctctccatgttcccatgtgcagtggactgacaacagtgagttcggggttgtgtagtaaagggaaagtattacttacccgcacctgctatacgtggtgtacgtaggatacgagttagtagtgcttagcaactttaaactggtgctgaaatattgcaaggtcactgaagttgtgaacgcgaacgctccgccactgccatgtatagcgtgcaatgcataaatggtgcactacatgatacgagggaatgggaaaccctccatggccgaatgcagggtgacagcctgccggcggatgcctgttgttagtataatccgttgtttgccac

SEQ ID NO: 658 - DNA, 443 bp, Sapelovirus sp.
acactcatttcccccctccacccttaaggtggttgtatcccctacaccctaccctcccttccacataggacgaataaacggacttgagattaaggcaagtacataaggtatggtttttggatacacttaaatggcagtagcgtggcgagctatggaaaaatcgcaattgtcgatagccatgttagcgacgcgcttcggcgtgctcctttggtgattcggcgactggttacaggagagtagacagtgagctatgggcaaacccctacagtattacttaggggaatgtgcaattgagacttgacgagcgtctctttgagatgtggcgcatgctcttggcattaccatagtgagcttccaggttgggaaacctggactgggtctatactgcctgatagggtcgcggctggccgcctgtaactagtatagtcagttgaaaacccccc

SEQ ID NO: 659 - DNA, 189 bp, Unknown
  Description of Unknown: Porcine reproductive and respiratory syndrome virus 2 sequence
atgacgtataggtgttggctctatgccttggcatttgtattgtcaggagctgtgaccattggcacagcccaaaacttgctgcacagaaacacccttctgtgatagcctccttcaggggagcttagggtttgtccctagcaccttgcttccggagttgcactgctttacggtctctccacccctttaacc

SEQ ID NO: 660 - DNA, 675 bp, Enterovirus sp.
gaaccttagaagtttacacaaacaaagaccaataggagtccaacacccagttggattgcggtcaagcacttctgtttccccggacctagtagtgataggctgtacccacggccgaagatgaacccgtccgttatccggctacctacttcgggaagcctagtaacattctgaagtctctgaggcgtttcgctcagcacgaccccggtgtagatcgggctgatgggtctccgcataccccacgggcgaccgtggcggaggccgcgttggcggcccgcctatggcgaaagccataggacgcctcttagatgacagggtgtgaagagcctactgagctgggtagtagtcctccggcccctgaatgcggctaatcctaaccacggagcgtccaccagcaatccagctggcagggcgtcgtaacgggcaactctgtggcggaaccgactactttgggtgtccgtgtttccttttgatcctattttggctgcttatggtgacaacgataagttgttatcataaagctcttgggttggccacctggaaaaagttatcagtgtttgatattgttcggctctcacgcctaccaataagacaagccctatatttacttgttgcattttactcgtcagaagaaatcacagagtatcatttggatttgttactcacattaaggacaag

SEQ ID NO: 661 - DNA, 591 bp, Unknown
  Description of Unknown: Pigeon picornavirus B sequence
tttatttagctgttaagttttatttgtgccgagaccccatagtaggatcttggtgttccacattaagctctcccgaccacacatccaaacgataggcggtgtaagggctccctggctaagtgtttactcattgctagggaagtgttgcgacccgttaccagtaggaatacaggaggtcttagttgcctaaccagataaagtggtgctgaaatattgcaagctcaatgtctggcgaacgacggactaccgttgaactattgttaacgcccgcgtgtgtaggcaacacacgggttagtaggtcacttacattgacatccgtgccgggaaagcggatctgagctatcgattgcctgatagggtgccggcgggcgcggtacgtgtggtatagtccgctgtcttggggtatggcgtctactcggttttgttgtcgttttggaatgtcccatgtcggagatgtcgttaccggtgtttgctttacttgtgcacgaataagaaaacagagtttggagttttggaagttaatggataacatcaagtttccattgcgttcctcgtgcattttaggccagaaaatcgaccacaaaatcgaga

SEQ ID NO: 662 - DNA, 620 bp, Unknown
  Description of Unknown: Picornavirus HK21 sequence
aaacgggaggatcggctttggcttatcctcttaatagtctacaaaactgggctgactggtgggggagctactagatccgggagaggactagttaccccgcgtaacttccctttttgtcactccctccacctaccccttccctgtcccttagactcttaagtaggtgtgcaggcctggccccccggaaatgggcaaatcggacgtttgcgtgtagggtcgttctgaaaggtggggcccactccaccgtagtaggatcttcctgtttcacgtttaaacctctccgggcaggtatcgctagacactaggctgtataggatggcacgcacttaggtttcgcaccttcctagtgcgccaagatcccgcttttgagctcaagtacatggttctttgtaagatgtctaaccagaggaggtggtgctgaaatattgcaagccactctggcgaacgtccactgcattgcctggaacaggctctctagcgccctccactggtagcgcggtggtgggttagtaggatacctatatggacaggggatgcgggaatacccctcactagctagtgactggttgatcgactggcggcggatccagtgatacttgcataatccgcagacttgggag

SEQ ID NO: 663 - DNA, 675 bp, Unknown
  Description of Unknown: Picornavirales Tottori-HG1 sequence
agccatgaactagtgtgcgattcccacagtgttggtcgaaagccccgcactgtctactcgcatatttgactccagtccttccgcagccagcggttaggttctggttaaagtgcattatgtgcacggcgccacgcagaactgccagaaatggtaagctgcgcccaacgccaacggtttgtgtatcccgttagtcacacgtttacagctgttcgttaacagtagggttttgtcgacccggaccccttaatgcgcgcgaattcaaccgcgcctagtcggcaatggtatcatttaatcccatgcactacgggagaaatttgagaccaaagaattcctgagggccactgcttgctctaagtgcaatgcctcgggagacttctgtcaggagcctagcggctttcaaccgcgacagctaactcctgcgggatgtttggtgtccatacttactggcgtcctcacaacgctaagtggatgttgtccacaggtaggcaaacaccgagccccacattcaggagacctgtatgaacgatcctatcagcattagagttggaattgggtgtgctaacgtccgcataagtgcaccccgtggtaacgctgggaaactatccagcgcaacgtactgtcctcaatgtctagggaaggaccgccctaagcgtacaaccgggccatgtgtcgagc

SEQ ID NO: 664 - DNA, 549 bp, Hepatovirus sp.
ttcaaagaggggtccgggattttcctggtccccctctttgggcacccttggctcgggggtgtgaataccgtgctcgcgtttgccgtgcgttaacggcttcatttatgtttgtttgtctgttttattatgttggtttgtctgtttgttatgttggtattgttcgtgtttaatgttatgaccacattacactccagccaatgaagaacagatggtgcggttattgctggcggaattcctaacgtcctggatccgttggtacgcatcacaaaacaatttgcagagagagtggtgaaacggcttgggaatccctgagtacagggaaatcacactgatagctcatcttggctgttttcagtcatggaccttatgcagtgtaatttgggtgtaccccccatagcttaggaggaatgttctgtcttggcactagagtgggacgctgatgcctccgtgtctaggatggtctaagggacagaatggggtgcctctgatgccatactacctgatagggtgctctcacggcctctgcatcttagtgagaagttcaatttt

SEQ ID NO: 665 - DNA, 107 bp, Unknown
  Description of Unknown: Rinderpest virus sequence
accaaacaaagttgggtaaggatcggtctatcaatgattatgatttagcacacttaggattcaagatcctatcgactggagcaggcttaaggtaaaggttctttaaa

SEQ ID NO: 666 - DNA, 675 bp, Rabovirus A
ctacggatatttgcatgacccgctttctatcgccccaacaatcccctttgtaaccacaagctttactcaggctagcagcccgactagctgtttggaagaaaaggctagggcacacaccaacaacaccgaccccactggtcgaaggccgcttggcaataagactggtggaacagggtcgcctgtagttgtttggaacattctttctaatgactttgtcagcggtgctactcacaccgtaactcttctaccctatccccacgcttgtggaactaggaggggatgagtgattcaagtaagtactgtcagaatggtgaaaatgatctgattctgaaacgctatggatccatcgaaagatggggctacacgcctgcggaacaacacatggtaacatgtgccccaggggccgaaagccacggtgataggatcacccgtgtagtttgagatcatatcaatgttcatagtctagtaagatgatttgaaatctaactgagctgatggctaactgcttgtcttattgcggcctaaggatgtcctgcaggtacctttagataaccttaagagactattgatctgagcaggagccaaagtggtctttcccagctttggttaaaaaacgtctaagccgcggcagggggcgggaggccccctttcctcccaaaacttaatattgattgt

SEQ ID NO: 667 - DNA, 410 bp, Shingleback nidovirus 1
ctgtgagtaccgacaggctcgaagtctattatgaggcgtcgaaacagaaaacctgtaacaactccggtttcatctatcactgccgtcaagaggcagaagaggacgaccacgtgtcaccagatcacttgtatctgtttcagtcaggaagtcaacttttcgacgaagttcgaccattcatcgacccgctgaaaagcgtagaagtcgatgaagatgagctccaaagagccatcgccgatttcgacaaccaaagtgactgtttccactccttcgagctcgtgaatttcgagctgaaacaacaaatcaacgagaacgagtggtacggttattataattacgacaaccaaaactgcaaagttcagttgccagtcacatgtcgaatcgaggacgtaacctgggatcaggtttacgtg

SEQ ID NO: 668 - DNA, 666 bp, Unknown
  Description of Unknown: Seneca valley virus sequence
tttgaaatggggggctgggccctgatgcccagtccttcctttccccttccggggggttaaccggctgtgtttgctagaggcacagaggggcaacatccaacctgcttttgcggggaacggtgcggctccgattcctgcgtcgccaaaggtgttagcgcacccaaacggcgcacctaccaatgttattggtgtggtctgcgagttctagcctactcgtttctcccccgaccattcactcacccacgaaaagtgtgttgtaaccataagatttaacccccgcacgggatgtgcgataaccgtaagactggctcaagcgcggaaagcgctgtaaccacatgctgttagtccctttatggctgcaagatggctacccacctcggatcactgaactggagctcgaccctccttagtaagggaaccgagaggccttcgtgcaacaagctccgacacagagtccacgtgactgctaccaccatgagtacatggttctcccctctcgacccaggacttctttttgaatatccacggctcgatccagagggtggggcatgacccctagcatagcgagctacagcgggaactgtagctaggccttagcgtgccttggatactgcctgatagggcgacggcctagtcgtgtcggttctataggtagcacatacaaat

SEQ ID NO: 669 - DNA, 675 bp, Unknown
  Description of Unknown: Sclerotinia sclerotiorum dsRNA mycovirus-L sequence
ttgaattaatcttttacgtttacgcgcataaaatcaggacacatctcttgtatactttagtatatcaatgatgtttttgttttatgcgattaatcgtaagagaacttctttccatccgcctgtatgggcgggataataagttcaccgccttggtcgaggcgcaaacttgtatgtgcaaaggtgagctatatgctcgaaatagtcgtaactaacacacagccactacctgtagagctctattgatccggaatcctttagtgggaatgcagagctcacaccggacctgcgggtatcttcggcgttagggacttctgtttcagccttgaatcatttacctttataccttctctgaggcgcctgggccgggcgcgatattaagtacaagtcaaggacatcgcgggtagtggtctaatcagccgctagtcctgctggagagttccaacttagttgggtgtggtgcatactagctggatagagtaggtatgtattgctaacgtatgccggaggctatccgtcctcggtagaacgtgccgaggagtagtctctgcagacccccgaacgcgtggggtctttacttaaatgtaggcggagggagcgctcgtaggtggaacgactgcctcccagtcgaatgcaagattttgcacgcggaccagtctgcccggcaattcccgggtg

SEQ ID NO: 670 - DNA, 675 bp, Enterovirus sp.
ctccggcacagccgcaccagtgcactggtacgctagtaccttttcacggggtagtcggtatccccccccgtaacttagaagcatgtaacaaaccgaccaataggtgcgcggcagccagctgcgttgcggtcaagcacttctgtctccccggtccgcaaggatcgttacccgcccactccactacgaggagcctagtaactggccaagtgattgcggagttgcgttcagccacaaccccagtggtagctctggaagatggggctcgcacatcccccgtggtaacacggttgcttgcccgcgtgtgcttccgggttcagtctccgactgttcacttcaacatcacgcaaccagccaagagccgattgtgctggagtggtcttcctccggggccgtgaatgctgctaatcctaacctccgagcgtgtgcgcacaatccagtgttgctacgtcgtaacgcgtaagttggaggcggaacagactactttcggcaccccgtgtttcctttattttattcttattttatggtgacaattgcagagatttgtgatattgcgactttaccgttaaacatagcactgcattacctggttgcattccacaaaacttcagagattcctagttcctacattgacctacttgtttatttgaatcttaaatacaaacttgagcaagtgaa

SEQ ID NO: 671 - DNA, 245 bp, Unknown
  Description of Unknown: Wobbly possum disease virus sequence
cggctgtgagtgcttagcatatgctagagtactacagccgggtgttggagtcatatgcactggttgcctgtataatagtcgggatctgtctgacctacattatctttgggagttgcttatcacgacaattctcgaagtgtctgtcgacagcttacccccgattcgacaaggccccttgtccaccgcagacctatcgattttcaacgagaacactatcagaggtttaaatttaaaactcaccaaca

SEQ ID NO: 672 - DNA, 631 bp, Avian orthoreovirus
gctttttcaatcccttgtgtcgatgttcccgtatgtcatctggttcatgtaacggtgcaacttctatttttggtaacgttcactgtcaggcagcgcaaaactcggcgggtggtgatcttcaagcgacttcctctcttgttgcttattggccctacttggctgcgggcggtggtctgctcgttgttattattataattgttggcgctgtttgttgttgcaaggctaaggttaaagcggacgcagcccgaaacgttttctaccgagagctgttcgcacttaattcgggtaaaagtgatgcaggacctccgatttaccaggtttagtgtacgacgatttgagttttcacctttcgtcttagaggagtgcactactccatctttcacgactataactaataccgatccggctctctactttaacattgagtttccgtcaagtcatcgtctctcccccttcattccagaactgttgtctcagccttgtaccgttcacgtttcattgattcggagattcgctctctgtgcaaccttatctagtatttgtgaatacgactgtgcgctactgccatccatcaacgctattacgacgatccctacaccaggtgcgtcatcatctctgattgttcattggg

SEQ ID NO: 673 - DNA, 665 bp, Kobuvirus sp.
ggggcctcggccccctcaccctcttttccggtggccacgcccgggccaccgatacttcccttcactccttcgggactgttggggaggaacacaacagggctcccctgttttcccattccttcccccttttcccaaccccaaccgccgtatctggtggcggcaagacacacgggtctttccctctaaagcacaattgtgtgtgtgtcccaggtcctcctgcgtacggtgcgggagtgctcccacccaactgttgtaagcctgtccaacgcgtcgtcctggcaagactatgacgtcgcatgttccgctgcggatgccgaccgggtaaccggttccccagtgtgtgtagtgcgatcttccaggtcctcctggttggcgttgtccagaaactgcttcaggtaagtggggtgtgcccaatccctacaaaggttgattctttcaccaccttaggaatgctccggaggtaccccagcaacagctgggatctgaccggaggctaattgtctacgggtggtgtttcctttttcttttcacacaactctactgctgacaactcactgactatccacttgctctcttgtgcctttctgctctggttcaagttccttgattgtttttgactgcttttcactgcttttcttctcacaatccttgctcagttcaaagtc

SEQ ID NO: 674 - DNA, 655 bp, Kobuvirus sp.
ccccctcaccctcttttccggtggccacgcccgggccaccgatacttcccttcactccttcgggactgttggggaggaacacaacagggctcccctgttttcccattccttcccccttttcccaaccccaaccgccgtatctggtggcggcaagacacacgggtctttccctctaaagcacaattgtgtgtgtgtcccaggtcctcctgcgtacggtgcgggagtgctcccacccaactgttgtaagcctgtccaacgcgtcgtcctggcaagactatgacgtcgcatgttccgctgcggatgccgaccgggtaaccggttccccagtgtgtgtagtgcgatcttccaggtcctcctggttggcgttgtccagaaactgcttcaggtaagtggggtgtgcccaatccctacaaaggttgattctttcaccaccttaggaatgctccggaggtaccccagcaacagctgggatctgaccggaggctaattgtctacgggtggtgtttcctttttcttttcacacaactctactgctgacaactcactgactatccacttgctctcttgtgcctttctgctctggttcaagttccttgattgtttttgactgcttttcactgcttttcttctcacaatccttgctcagttcaaagtc

SEQ ID NO: 675 - DNA, 645 bp, Kobuvirus sp.
ctcttttccggtggccacgcccgggccaccgatacttcccttcactccttcgggactgttggggaggaacacaacagggctcccctgttttcccattccttcccccttttcccaaccccaaccgccgtatctggtggcggcaagacacacgggtctttccctctaaagcacaattgtgtgtgtgtcccaggtcctcctgcgtacggtgcgggagtgctcccacccaactgttgtaagcctgtccaacgcgtcgtcctggcaagactatgacgtcgcatgttccgctgcggatgccgaccgggtaaccggttccccagtgtgtgtagtgcgatcttccaggtcctcctggttggcgttgtccagaaactgcttcaggtaagtggggtgtgcccaatccctacaaaggttgattctttcaccaccttaggaatgctccggaggtaccccagcaacagctgggatctgaccggaggctaattgtctacgggtggtgtttcctttttcttttcacacaactctactgctgacaactcactgactatccacttgctctcttgtgcctttctgctctggttcaagttccttgattgtttttgactgcttttcactgcttttcttctcacaatccttgctcagttcaaagtc

SEQ ID NO: 676 - DNA, 635 bp, Kobuvirus sp.; identical to SEQ ID NO: 352

SEQ ID NO: 677 - DNA, 625 bp, Kobuvirus sp.
ccgggccaccgatacttcccttcactccttcgggactgttggggaggaacacaacagggctcccctgttttcccattccttcccccttttcccaaccccaaccgccgtatctggtggcggcaagacacacgggtctttccctctaaagcacaattgtgtgtgtgtcccaggtcctcctgcgtacggtgcgggagtgctcccacccaactgttgtaagcctgtccaacgcgtcgtcctggcaagactatgacgtcgcatgttccgctgcggatgccgaccgggtaaccggttccccagtgtgtgtagtgcgatcttccaggtcctcctggttggcgttgtccagaaactgcttcaggtaagtggggtgtgcccaatccctacaaaggttgattctttcaccaccttaggaatgctccggaggtaccccagcaacagctgggatctgaccggaggctaattgtctacgggtggtgtttcctttttcttttcacacaactctactgctgacaactcactgactatccacttgctctcttgtgcctttctgctctggttcaagttccttgattgtttttgactgcttttcactgcttttcttctcacaatccttgctcagttcaaagtc

SEQ ID NO: 678 - DNA, 675 bp, Unknown
  Description of Unknown: Picornavirales sp. isolate RtMruf-PicoV sequence
tttgctcagcgtaacttctccgggttacgtggagaccaaaaggctacggagactcgggctacggccctggagcacctaggtgctcctaaagacgttagaagttgtacaaactcgcccaatagggccccccaaccaggggggtagcgggcaagcacttctgtttccccggtatgatctcataggctgtacccacggctgaaagagagattatcgttacccgcctcactacttcgagaagcccagtaatggttcatgaagttgatctcgttgacccggtgtttcccccacaccagaaacctgtgatgggggtggtcatcccggtcatggcgacatgacggacctccccgcgccggcacagggcctcttcggaggacgagtgacatggattcaaccgtgaagagcctattgagctagtgttgattcctccgcccccgtgaatgcggctaatcccaactccggagcaggcgggcccaaaccagggtctggcctgtcgtaacgcgaaagtctggagcggaaccgactactttcgggaaggcgtgtttccttttgttccttttatcaagttttatggtgacaactcctggtagacgttttattgcgtttattgagagatttccaacaattgaacagactagaaccacttgttttatcaaaccctcacagaataagataaca

SEQ ID NO: 679 - DNA, 675 bp, Unknown
  Description of Unknown: Apodemus agrarius picornavirus strain Longquan-Aa118 sequence
ttactcagcgtaactactccgggttacgtgatgaagaagaggctacggagattctcgggctacggccctggagccactccggctcctaaagatttagaagtttgagcacacccgcccactagggccccccatccaggggggcaacgggcaagcacttctgtttccccggtatgatctgataggctgtaaccacggctgaaacagagattatcgttatccgcttcactacttcgagaagcctagtaatgatgggtgaaattgaatccgttgatccggtgtctcccccacaccagaaactcatgatgagggttgccatcccggctacggcgacgtagcgggcatccctgcgctggcatgaggcctcttaggaggacggatgatatggatcttgtcgtgaagagcctattgagctagtgtcgactcctccgcccccgtgaatgcggctaatcctaaccccggagcaggtgggtccaatccagggcctggcctgtcgtaatgcgtaagtctgggacggaaccgactactttcgggaaggcgtgtttccatttgttcattatttgtgtgtttatggtgacaactctgggtaaacgttctattgcgtttattgagagattcccaacaattgaacaaacgagaactacctgttttattaaatttacacagagaagaattaca

SEQ ID NO: 680 - DNA, 675 bp, Unknown
  Description of Unknown: Niviventer confucianus picornavirus sequence
ccctttcataaccccccccttttaacccaacccttcgtaaccgtacgcttcactcgcctttgggtatagcggcccaatgtgctgaagaaaaggatacgctataaggggccaacgggtggtggcccttaagaccacccaacctagaagcttgtacactcgggcaatagtgaggcccacatccagtgggtcaagcccaaagcattcttgttccccggtatgatctcataagctgtacccacggctgaaagagtgattatcgttatcccactcagtacttcggagagcctagtacaccacttggaaatggaagtctgtgatccggggttgaccctgaaccccagaaactcatgatgaggctaaccttcccgaacacggcgacgtgtggttagcctgcgctggcatgaggcctctttgtaggcagactgaaatggaagggtgacgaagagccgactgagctactgttttattcctccggccccctgaatgcggctaatcctaactcctggtccagtacttgtaacccaacaggtggctggtcgtaatgcgtaagccgggagcggaaccgactactttggggcgtccgtgtttctcaatattattcatttctagcttatggtgacaatttatgattgcagagattgtgctgtatttgtgtctgagagaagaagtaacaat

SEQ ID NO: 681 - DNA, 619 bp, Unknown
  Description of Unknown: Bat picornavirus isolate BtRs-PicoV sequence
tttcaaaaggccctgggcatacggcgttattcgtaacgtcgtatgtccagggcggtagcatcaggccaaggcctgatgctaccacgtgtggactaaaccacacactcttcttgtgacacgttgtgtcacctatccctttcttggtaacttagaagcttgtacacttacgcacgtaggtgccccacatccagtggggtttgtgcaaagcaatcttgttccccggtaaaccctgataggctgtaaccacggccgaaacaaggtttgtcgttacccgactcactactacacaaagcctagtaaagttcaatgaaagtgcgcagcgtgatccggtcaaaacccccttgaccagaaacacatgatgagggtcaccaacccccactggcgacagtgtggtgtccctgcgttggcatgtggcctcgtagaggcgttgcaatctggatttgctccgaagagccccgtgtgctagtgtttatacctccggccccttgaatgcggctaatcctaacccccgagcatgtacacacaagccagtgtgtagcatgtcgtaatgagcaatttggggatggaaccgactactttagggtgtccgtgtttctcattattctttgtttgatgtttt

SEQ ID NO: 682 - DNA, 593 bp, Unknown
  Description of Unknown: Rhinolophus picornavirus strain Guizhou-Rr100 sequence
ttttttttctcaggcggtagcatccagccaaggcctgatgctaccaacgtgtgactaaaccacactctctttttgtgatacattgtgtcacctatccctttcttggtaacttagaagcttgtacacccacgcacgtaggtaccccacatccagtggggtttgtgcaaagcattcttgttccccggtaaaccctgataggctgtaaccacggctgaaacaaggtttgtcgttacccgactcactactacgcaaagcctagtaaagttcaatgaaagtgcgcagcgtgatccggtcaaaacccccttgaccagaaacacatgatgagggtcaccaacccccactggcgacagtgtggtgtccctgcgttggcatgtggcctcatagaggcgttgcaatctggatttgctccgaagagccccgtgtgctagtgtttatacctccggccccttgaatgcggctaatcctaacccccgagcatgtacacacacgccagtgtgcagcatgtcgtaatgagcaatttggggatggaaccgactactttagggtgtccgtgtttctcattattctttgtttgatgttttatggtgacaaca

SEQ ID NO: 683 - DNA, 597 bp, Unknown
  Description of Unknown: Rhinolophus picornavirus strain Henan-Rf265 sequence
cggaacgttgtatgctcagggcgtaggcaccacccacgggtggtgcctacacgtgtggactaaaccacacactcttttcagcacttagtgctgctatctctttttgtaacttagaagtttgtacacaatgcgttagggccacacatccagtgtggtatcgcaaagcacttctgtttccccggtgctagtaggagggtggctgctccacggccacttgccgaacccatcgttacccgactcattacttcgcaaagcctagtaacccagttgaagcaagcccggcgtgttccggtcaggaaaaaccccccctggccagaaacatgtgatgagggtgggctatccccactggtgacagtgagccctccctgcgttggcacatggcccgatctgggcgtggttcttgtggatgctgccgaagagccccgtgagctagtgtttataccgccggcctcgtgaatgcggctaaccctaaccccggagcagaggctactgaagccacagtagtcgctgtcgtaacgagtaattctgggatgggaccgactactttcgagtgtccgtgtttcctttattcttttattgttgtttatggtgacaaac

SEQ ID NO: 684 - DNA, 636 bp, Enterovirus sp.
cccctaggatccactggatgtcagtacactggtatcgtggtacctttgtacgcctgttttatacccccttccccgcaactttagaagcatcaaaagcaccgctcaatagtcaccacacccccagtgtggtttcgagcaagcacttctgttttcccggttgcgtcccatatgctgtgcaaacggcaaaaagggacaatatcgttacccgcttgtatactacgggaaacctagtaccaccattgattgtgttgagagttgcgctcatcacctttccccggtgtagctcaggccgatgaggctcagaatcccccacaggtgactgtgtctgagcctgcgttggcggcctgccctcgccttatggcgtgggacgcttgatacatgacatggtgcgaagagtctactgtgctatgcaagagtcctccggcccctgaatgtggctaatcctaaccactgatcccacgcacgcaaaccagtgtgtagtgggtcgtaacgcgcaagtcggtggcggaaccaactactttgggtgaccgtgtttcctttattacttattgaatgtttatggtgacaattgtttgattcagttgttgccattctctacattcatttacccagcatcaaaccaattgaactgttaca

SEQ ID NO: 685 - DNA, 421 bp, Unknown
  Description of Unknown: Human poliovirus 1 strain NIE1116623 sequence
agtctggacatccctcaccggcgacggtggtccaggctgcgctggcggcctacctgtggtccaaagccacgggacgctacatgtgaacaaggtgtgaagagcctattgagctacaaaagagtcctccggcccctgaatgcggctaatcccaaccacggatcaagggtgcacaaaccagtgtacaccttgtcgtaacgcgcaagtctgtggcggaaccgactactttgggtgtccgtgtttcctttttaattttgatggctgcttatggtgacaatcatagattgttatcataaagctaattggattggccatccggtgagagtgaaatatattgtttacctccctgttgggtttactctaactaacttctccatttataaacttgtcatcacagttttaataattagaagtgcagtttaca

SEQ ID NO: 686 - DNA, 663 bp, Enterovirus sp.
tttaaaacagcctgggggttgttcccacccccagggcccactgggcgttagtactctggtatcgcggtaccttagtatgcctgttttatgtctcctttcccccgcaactttagaagtaatcaagttatggctcaacagtcgccacacccccagtgtggttccgagcaagcacttctgttccccggttgcgtcttatatgctgtgtgaacggcagaaagggacaatatcgttatccgctcaactactacgggaagcctagtaccaccatggattgacctgaaagttgcgttcagcgcacccccagcgcagctcaggccgatgaggctccgaataccccacgggcgaccgtgtcggagcctgcgttggcggcctgcccacgttgcaaaacgtgggacgctcatttcatgacatggtgcgaagagcctactgtgctagttgagagtcctccggcccctgaatgtggataatcctaaccactgaacctacgggcgcaaaccagcgtctggtaggccgtaacgcgcaagtcggtggcggaaccaactactttgggtgtccgtgtttccttttatctttttgaatgtttatggtgacaattgttgtgtacagttgttaccatagtttgcattcagaaataaacctaacactttccaattatttgttaca

SEQ ID NO: 687 - DNA, 675 bp, Unknown
  Description of Unknown: Human poliovirus 2 strain NIE0811460 sequence
ttgtgcgcctgttttatattccccccccgcaacttagaagcacgaaaccaagttcaatagaagggggtacaaaccagtaccaccacgaacaagcacttctgtttccccggtgacattgcatagactgctcacgcggttgaaagtgatcgatccgttacccgcttgtgtacttcgaaaagcctagtattgccttggaatcttcgacgcgttgcgctcagcacccgaccccggggtgtagcttaggctgatgagtctggacattcctcaccggtgacggtggtccaggctgcgttggcggcctacctatggctaatgccataggacgctagatgtgaacaaggtgtgaagagcctattgagctacataagagtcctccggcccctgaatgcggctaatcctaaccacggagcaggcggtcgcaaaccagtgactagcttgtcgtaacgcgcaagtctgtggcggaaccgactactttgggtgtccgtgtttcctgttatttttattatggctgcttatggtgacaatcagagattgttatcataaagcgaattggattggccatccggtgagtgttgtgtcaggtatacaactgtttgttggaaccactgtgttagtttaacctctctttcaaccaattagtcaaaaacaatacgaagatagaacaacaatactaca

SEQ ID NO: 688 - DNA, 512 bp, Unknown; identical to SEQ ID NO: 491
  Description of Unknown: Bovine picornavirus sequence

SEQ ID NO: 689 - DNA, 675 bp, Unknown
  Description of Unknown: Human poliovirus 1 strain EQG1419328 sequence
acccttgtacgcctgttttatactcccctccccgtaacttagaagaaacaaaataagttcaataggagggggtacaaaccagtaccaccacgaacaagcacttctgtctccccggtgacattgcatagactgtccccacggttgaaagcaattgatccgttacccgctcttgtacttcgagaagcctagtaccatcttggaatcatcgatgcgttgcgctccacactcagtcccagagtgtagcttaggctgatgagtctggacattcctcaccggcgacggtggtccaggctgcgttggcggcctacctgtggcccaaagccacaggacgctagatgtgaacaaggtgtgaagagcctattgagctataagagagtcctccggcccctgaatgcggctaatcccaaccacggatcaagggtgcacgaaccagtgtataccttgtcgtaacgcgcaagtccgtggcggaaccgactactttgggtgaccgtgtttccttttattatttcaatggctgcttatggtgacaatcattgattgttatcataaagcgaattggactggccatccggtgaaagtgaaacatattgtttgcctcctcgttgggtctacttcaaccaatctttacttacaatcttaccactacagttttgctggttagaagtgtgtttcacg

SEQ ID NO: 690 - DNA, 675 bp, Unknown
  Description of Unknown: Human poliovirus 2 isolate IS_061 sequence
ttgtgcgcctgttttatactcccctcccgcaacttagaagcacgaaaccaagttcaatagaagggggtacaaaccagtaccactacgaacaagcacttctgtttccccggtgacattgcatagactgctcacgcggttgaaagtgatcgatccgttacccgcttgtgtacttcgaaaagcctagtatcgccttggaatcttcgacgcgttgcgctcagcacccgaccccggggtgtagcttaggccgatgagtctggacattcctcaccggtgacggtggtccaggctgcgttggcggcctacctatggctaacgccataggacgttagatgtgaacaaggtgtgaagagcctattgagctacataagagtcctccggcccctgaatgcggctaatcctaaccacggagcaggcggtcgcgaaccagtgactggcttgtcgtaacgcgcaagtctgtggcggaaccgactactttgggtgtccgtgtttcctgttatttttatcatggctgcttatggtgacaatcagagattgttatcataaagcgaattggattggccatccggtgagtgttgtgtcaggtatacaactgtttgttggaaccactgtgttagctttgcttctcatttaaccaattaatcaaaaacaatacgaggataaaacaacaatactaca

SEQ ID NO: 691 - DNA, 675 bp, Unknown
  Description of Unknown: Coxsackievirus B5 sequence
cctttgtgcgcctgttttatgcccccttcccccaattgaaacttagaagttacacacaccgatcaacagcgggcgtggcataccagccgcgtcttgatcaagcactcctgtttccccggaccgagtatcaatagactgctcacgcggttgaaggagaaaacgttcgttacccggctaactacttcgagaaacctagtagcatcatgaaagttgcgaagcgtttcgctcagcacatccccagtgtagatcaggtcgatgagtcaccgcattccccacgggcgaccgtggcggtggctgcgttggcggcctgcctacggggcaacccgtaggacgcttcaatacagacatggtgcgaagagtcgattgagctagttagtagtcctccggcccctgaatccggctaatcctaactgcggagcacataccctcaacccagggggcattgtgtcgtaacgggtaactctgcagcggaaccgactactttgggtgtccgtgtttccttttattcttataatggctgcttatggtgacaattgaaagattgttaccatatagctattggattggccatccggtgtctaacagagctattatatacctctttgttggatttgtaccacttgatctaaaggaagtcaagacactacaattcatcatacaattgaacacagcaaa

SEQ ID NO: 692 - DNA, 675 bp, Unknown
  Description of Unknown: Coxsackievirus A10 sequence
tttgtgcgcctgttttacaacccttccccaacttgtaacgtagaagtaatacacactactgatcaatagcaggcatggcgcgccagtcatgtctcgatcaagcacttctgttcccccggactgagtatcaatagactgctcacgcggttgaaggagaaaacgttcgttacccggctaactacttcgagaaacctagtagcaccatagaagctgcagagtgtttcgctcagcacttcccccgtgtagatcaggctgatgagtcactgcaatccccacgggtgaccgtggcagtggctgcgttggcggcctgcctatggggcaacccataggacgctctaatgtggacatggtgcgaagagtctattgagctagttagtagtcctccggcccctgaatgcggctaatcctaactgcggagcacatgccttcaacccagaaggtagtgtgtcgtaacgggcaactctgcagcggaaccgactactttgggtgtccgtgtttctttttattcctatattggctgcttatggtgacaatcacggaattgttgccatatagctattggattggccatccggtgtctaatagagctattgtgtacctatttgttggatttactccgctatcacataaatctctgaacactttgtgctttatattgaacttaaacacccgaaa

SEQ ID NO: 693 - protein, 18 aa, Unknown
  Description of Unknown: Liver targeting moiety sequence
CKNEKKNIERNNKLKQPP

SEQ ID NO: 694 - DNA, 30 bp, Artificial Sequence
  Description of Artificial Sequence: Synthetic oligonucleotide
tataattctaccctattgaggcattgacta

SEQ ID NO: 695 - protein, 493 aa, Artificial Sequence
  Description of Artificial Sequence: Synthetic polypeptide
MALPVTALLLPLALLLHAARPDIVLTQSPASLAVSLGERATINCRASESVSVIGAHLIHWYQQKPGQPPKLLIYLASNLETGVPARFSGSGSGTDFTLTISSLQAEDAAIYYCLQSRIFPRTFGQGTKLEIKGSTSGSGKPGSGEGSTKGQVQLVQSGSELKKPGASVKVSCKASGYTFTDYSINWVRQAPGQGLEWMGWINTETREPAYAYDFRGRFVFSLDTSVSTAYLQISSLKAEDTAVYYCARDYSYAMDYWGQGTLVTVSSAAATTTPAPRPPTPAPTIASQPLSLRPEACRPAAGGAVHTRGLDFACDIYIWAPLAGTCGVLLLSLVITLYCKRGRKKLLYIFKQPFMRPVQTTQEEDGCSCRFPEEEEGGCELRVKFSRSADAPAYQQGQNQLYNELNLGRREEYDVLDKRRGRDPEMGGKPRRKNPQEGLYNELQKDKMAEAYSEIGMKGERRRGKGHDGLYQGLSTATKDTYDALHMQALPPR

SEQ ID NO: 696 - protein, 207 aa, Artificial Sequence
  Description of Artificial Sequence: Synthetic polypeptide
KNQVEQSPQSLIILEGKNCTLQCNYTVSPFSNLRWYKQDTGRGPVSLTIMTFSENTKSNGRYTATLDADTKQSSLHITASQLSDSASYICVVNHSGGSYIPTFGRGTSLIVHPYIQKPDPAVYQLRDSKSSDKSVCLFTDFDSQTNVSQSKDSDVYITDKTVLDMRSMDFKSNSAVAWSNKSDFACANAFNNSIIPEDTFFPSPESS

SEQ ID NO: 697 - protein, 246 aa, Artificial Sequence
  Description of Artificial Sequence: Synthetic polypeptide
DVKVTQSSRYLVKRTGEKVFLECVQDMDHENMFWYRQDPGLGLRLIYFSYDVKMKEKGDIPEGYSVSREKKERFSLILESASTNQTSMYLCASSFLMTSGDPYEQYFGPGTRLTVTEDLKNVFPPEVAVFEPSEAEISHTQKATLVCLATGFYPDHVELSWWVNGKEVHSGVSTDPQPLKEQPALNDSRYCLSSRLRVSATFWQNPRNHFRCQVQFYGLSENDEWTQDRAKPVTQIVSAEAWGRAD

SEQ ID NO: 698 - protein, 115 aa, Artificial Sequence
  Description of Artificial Sequence: Synthetic polypeptide
MQEVTQIPAALSVPEGENLVLNCSFTDSAIYNLQWFRQDPGKGLTSLLLIQSSQREQTSGRLNASLDKSSGRSTLYIAASQPGDSATYLCAVRPTSGGSYIPTFGRGTSLIVHPY

SEQ ID NO: 699 - protein, 112 aa, Artificial Sequence
  Description of Artificial Sequence: Synthetic polypeptide
MGVTQTPKFQVLKTGQSMTLQCAQDMNHEYMSWYRQDPGMGLRLIHYSVGAGITDQGEVPNGYNVSRSTTEDFPLRLLSAAPSQTSVYFCASSYVGNTGELFFGEGSRLTVL

SEQ ID NO: 700 - protein, 166 aa, Artificial Sequence
  Description of Artificial Sequence: Synthetic polypeptide
APPRLICDSRVLERYLLEAKEAENITTGCAEHCSLNENITVPDTKVNFYAWKRMEVGQQAVEVWQGLALLSEAVLRGQALLVNSSQPWEPLQLHVDKAVSGLRSLTTLLRALGAQKEAISPPDAASAAPLRTITADTFRKLFRVYSNFLRGKLKLYTGEACRTGDR

SEQ ID NO: 701 - protein, 452 aa, Artificial Sequence
  Description of Artificial Sequence: Synthetic polypeptide
MSTAVLENPGLGRKLSDFGQETSYIEDNCNQNGAISLIFSLKEEVGALAKVLRLFEENDVNLTHIESRPSRLKKDEYEFFTHLDKRSLPALTNIIKILRHDIGATVHELSRDKKKDTVPWFPRTIQELDRFANQILSYGAELDADHPGFKDPVYRARRKQFADIAYNYRHGQPIPRVEYMEEEKKTWGTVFKTLKSLYKTHACYEYNHIFPLLEKYCGFHEDNIPQLEDVSQFLQTCTGFRLRPVAGLLSSRDFLGGLAFRVFHCTQYIRHGSKPMYTPEPDICHELLGHVPLFSDRSFAQFSQEIGLASLGAPDEYIEKLATIYWFTVEFGLCKQGDSIKAYGAGLLSSFGELQYCLSEKPKLLPLELEKTAIQNYTVTEFQPLYYVAESFNDAKEKVRNFAATIPRPFSVRYDPYTQRIEVLDNTQQLKILADSINSEIGILCSALQKIK

SEQ ID NO: 702 - protein, 1462 aa, Artificial Sequence
  Description of Artificial Sequence: Synthetic polypeptide
LSVKAQTAHIVLEDGTKMKGYSFGHPSSVAGEVVFNTGLGGYPEAITDPAYKGQILTMANPIIGNGGAPDTTALDELGLSKYLESNGIKVSGLLVLDYSKDYNHWLATKSLGQWLQEEKVPAIYGVDTRMLTKIIRDKGTMLGKIEFEGQPVDFVDPNKQNLIAEVSTKDVKVYGKGNPTKVVAVDCGIKNNVIRLLVKRGAEVHLVPWNHDFTKMEYDGILIAGGPGNPALAEPLIQNVRKILESDRKEPLFGISTGNLITGLAAGAKTYKMSMANRGQNQPVLNITNKQAFITAQNHGYALDNTLPAGWKPLFVNVNDQTNEGIMHESKPFFAVQFHPEVTPGPIDTEYLFDSFFSLIKKGKATTITSVLPKPALVASRVEVSKVLILGSGGLSIGQAGEFDYSGSQAVKAMKEENVKTVLMNPNIASVQTNEVGLKQADTVYFLPITPQFVTEVIKAEQPDGLILGMGGQTALNCGVELFKRGVLKEYGVKVLGTSVESIMATEDRQLFSDKLNEINEKIAPSFAVESIEDALKAADTIGYPVMIRSAYALGGLGSGICPNRETLMDLSTKAFAMTNQILVEKSVTGWKEIEYEVVRDADDNCVTVCNMENVDAMGVHTGDSVVVAPAQTLSNAEFQMLRRTSINVVRHLGIVGECNIQFALHPTSMEYCIIEVNARLSRSSALASKATGYPLAFIAAKIALGIPLPEIKNVVSGKTSACFEPSLDYMVTKIPRWDLDRFHGTSSRIGSSMKSVGEVMAIGRTFEESFQKALRMCHPSIEGFTPRLPMNKEWPSNLDLRKELSEPSSTRIYAIAKAIDDNMSLDEIEKLTYIDKWFLYKMRDILNMEKTLKGLNSESMTEETLKRAKEIGFSDKQISKCLGLTEAQTRELRLKKNIHPWVKQIDTLAAEYPSVTNYLYVTYNGQEHDVNFDDHGMMVLGCGPYHIGSSVEFDWCAVSSIRTLRQLGKKTVVVNCNPETVSTDFDECDKLYFEELSLERILDIYHQEACGGCIISVGGQIPNNLAVPLYKNGVKIMGTSPLQIDRAEDRSIFSAVLDELKVAQAPWKAVNTLNEALEFAKSVDYPCLLRPSYVLSGSAMNVVFSEDEMKKFLEEATRVSQEHPVVLTKFVEGAREVEMDAVGKDGRVISHAISEHVEDAGVHSGDATLMLPTQTISQGAIEKVKDATRKIAKAFAISGPFNVQFLVKGNDVLVIECNLRASRSFPFVSKTLGVDFIDVATKVMIGENVDEKHLPTLDHPIIPADYVAIKAPMFSWPRLRDADPILRCEMASTGEVACFGEGIHTAFLKAMLSTGFKIPQKGILIGIQQSFRPRFLGVAEQLHNEGFKLFATEATSDWLNANNVPATPVAWPSQEGQNPSLSSIRKLIRDGSIDLVINLPNNNTKFVHDNYVIRRTAVDSGIPLLTNFQVTKLFAEAVQKSRKVDSKSLFHYRQYSAGKAA

SEQ ID NO: 703 - protein, 1053 aa, Artificial Sequence
  Description of Artificial Sequence: Synthetic polypeptide
MKRNYILGLDIGITSVGYGIIDYETRDVIDAGVRLFKEANVENNEGRRSKRGARRLKRRRRHRIQRVKKLLFDYNLLTDHSELSGINPYEARVKGLSQKLSEEEFSAALLHLAKRRGVHNVNEVEEDTGNELSTKEQISRNSKALEEKYVAELQLERLKKDGEVRGSINRFKTSDYVKEAKQLLKVQKAYHQLDQSFIDTYIDLLETRRTYYEGPGEGSPFGWKDIKEWYEMLMGHCTYFPEELRSVKYAYNADLYNALNDLNNLVITRDENEKLEYYEKFQIIENVFKQKKKPTLKQIAKEILVNEEDIKGYRVTSTGKPEFTNLKVYHDIKDITARKEIIENAELLDQIAKILTIYQSSEDIQEELTNLNSELTQEEIEQISNLKGYTGTHNLSLKAINLILDELWHTNDNQIAIFNRLKLVPKKVDLSQQKEIPTTLVDDFILSPVVKRSFIQSIKVINAIIKKYGLPNDIIIELAREKNSKDAQKMINEMQKRNRQTNERIEEIIRTTGKENAKYLIEKIKLHDMQEGKCLYSLEAIPLEDLLNNPFNYEVDHIIPRSVSFDNSFNNKVLVKQEENSKKGNRTPFQYLSSSDSKISYETFKKHILNLAKGKGRISKTKKEYLLEERDINRFSVQKDFINRNLVDTRYATRGLMNLLRSYFRVNNLDVKVKSINGGFTSFLRRKWKFKKERNKGYKHHAEDALIIANADFIFKEWKKLDKAKKVMENQMFEEKQAESMPEIETEQEYKEIFITPHQIKHIKDFKDYKYSHRVDKKPNRELINDTLYSTRKDDKGNTLIVNNLNGLYDKDNDKLKKLINKSPEKLLMYHHDPQTYQKLKLIMEQYGDEKNPLYKYYEETGNYLTKYSKKDNGPVIKKIKYYGNKLNAHLDITDDYPNSRNKVVKLSLKPYRFDVYLDNGVYKFVTVKNLDVIKKENYYEVNSKCYEEAKKLKKISNQAEFIASFYNNDLIKINGELYRVIGVNNDLLNRIEVNMIDITYREYLENMNDKRPPRIIKTIASKTQSIKKYSTDILGNLYEVKSKKHPQIIKKG

SEQ ID NO: 704 - protein, 1353 aa, Artificial Sequence
  Description of Artificial Sequence: Synthetic polypeptide
AAGGILHLELLVAVGPDVFQAHQEDTERYVLTNLNIGAELLRDPSLGAQFRVHLVKMVILTEPEGAPNITANLTSSLLSVCGWSQTINPEDDTDPGHADLVLYITRFDLELPDGNRQVRGVTQLGGACSPTWSCLITEDTGFDLGVTIAHEIGHSFGLEHDGAPGSGCGPSGHVMASDGAAPRAGLAWSPCSRRQLLSLLSAGRARCVWDPPRPQPGSAGHPPDAQPGLYYSANEQCRVAFGPKAVACTFAREHLDMCQALSCHTDPLDQSSCSRLLVPLLDGTECGVEKWCSKGRCRSLVELTPIAAVHGRWSSWGPRSPCSRSCGGGVVTRRRQCNNPRPAFGGRACVGADLQAEMCNTQACEKTQLEFMSQQCARTDGQPLRSSPGGASFYHWGAAVPHSQGDALCRHMCRAIGESFIMKRGDSFLDGTRCMPSGPREDGTLSLCVSGSCRTFGCDGRMDSQQVWDRCQVCGGDNSTCSPRKGSFTAGRAREYVTFLTVTPNLTSVYIANHRPLFTHLAVRIGGRYVVAGKMSISPNTTYPSLLEDGRVEYRVALTEDRLPRLEEIRIWGPLQEDADIQVYRRYGEEYGNLTRPDITFTYFQPKPRQAWVWAAVRGPCSVSCGAGLRWVNYSCLDQARKELVETVQCQGSQQPPAWPEACVLEPCPPYWAVGDFGPCSASCGGGLRERPVRCVEAQGSLLKTLPPARCRAGAQQPAVALETCNPQPCPARWEVSEPSSCTSAGGAGLALENETCVPGADGLEAPVTEGPGSVDEKLPAPEPCVGMSCPPGWGHLDATSAGEKAPSPWGSIRTGAQAAHVWTPAAGSCSVSCGRGLMELRFLCMDSALRVPVQEELCGLASKPGSRREVCQAVPCPARWQYKLAACSVSCGRGVVRRILYCARAHGEDDGEEILLDTQCQGLPRPEPQEACSLEPCPPRWKVMSLGPCSASCGLGTARRSVACVQLDQGQDVEVDEAACAALVRPEASVPCLIADCTYRWHVGTWMECSVSCGDGIQRRRDTCLGPQAQAPVPADFCQHLPKPVTVRGCWAGPCVGQGTPSLVPHEEAAAPGRTTATPAGASLEWSQARGLLFSPAPQPRRLLPGPQENSVQSSACGRQHLEPTGTIDMRGPGQADCAVAIGRPLGEVVTLRVLESSLNCSAGDMLLLWGRLTWRKMCRKLLDMTFSSKTNTLVVRQRCGRPGGGVLLRYGSQLAPETFYRECDMQLFGPWGEIVSPSLSPATSNAGGCRLFINVAPHARIAIHALATNMGAGTEGANASYILIRDTHSLRTTAFHGQQVLYWESESSQAEMEFSEGFLKAQASLRGQYWTLQSWVPEMQDPQSWKGKEGT

SEQ ID NO: 705 - protein, 431 aa, Artificial Sequence; identical to SEQ ID NO: 343
  Description of Artificial Sequence: Synthetic polypeptide

SEQ ID NO: 706 - protein, 160 aa, Artificial Sequence; identical to SEQ ID NO: 337
  Description of Artificial Sequence: Synthetic polypeptide

SEQ ID NO: 707 - protein, 133 aa, Artificial Sequence [sequence omitted]

SEQ ID NO: 708 - protein, 20 aa, Artificial Sequence
  Description of Artificial Sequence: Synthetic peptide
  MISC_FEATURE (1)..(20): This sequence may encompass 1-10 "Gly Ser" repeating units
GSGSGSGSGSGSGSGSGSGS

SEQ ID NO: 709 - protein, 30 aa, Artificial Sequence
  Description of Artificial Sequence: Synthetic polypeptide
  MISC_FEATURE (1)..(30): This sequence may encompass 1-10 "Gly Gly Ser" repeating units
GGSGGSGGSGGSGGSGGSGGSGGSGGSGGS

SEQ ID NO: 710 - protein, 40 aa, Artificial Sequence
  Description of Artificial Sequence: Synthetic polypeptide
  MISC_FEATURE (1)..(40): This sequence may encompass 1-10 "Gly Gly Gly Ser" repeating units
GGGSGGGSGGGSGGGSGGGSGGGSGGGSGGGSGGGSGGGS

SEQ ID NO: 711 - protein, 40 aa, Artificial Sequence
  Description of Artificial Sequence: Synthetic polypeptide
  MISC_FEATURE (1)..(40): This sequence may encompass 1-10 "Gly Gly Ser Gly" repeating units
GGSGGGSGGGSGGGSGGGSGGGSGGGSGGGSGGGSGGGSG

SEQ ID NO: 712 - protein, 50 aa, Artificial Sequence
  Description of Artificial Sequence: Synthetic polypeptide
  MISC_FEATURE (1)..(50): This sequence may encompass 1-10 "Gly Gly Ser Gly Gly" repeating units
GGSGGGGSGGGGSGGGGSGGGGSGGGGSGGGGSGGGGSGGGGSGGGGSGG

SEQ ID NO: 713 - protein, 50 aa, Artificial Sequence
  Description of Artificial Sequence: Synthetic polypeptide
  MISC_FEATURE (1)..(50): This sequence may encompass 1-10 "Gly Gly Gly Gly Ser" repeating units
GGGGSGGGGSGGGGSGGGGSGGGGSGGGGSGGGGSGGGGSGGGGSGGGGS

SEQ ID NO: 714 - protein, 50 aa, Artificial Sequence
  Description of Artificial Sequence: Synthetic polypeptide
  MISC_FEATURE (1)..(50): This sequence may encompass 1-10 "Gly Gly Gly Gly Gly" repeating units
GGGGGGGGGGGGGGGGGGGGGGGGGGGGGGGGGGGGGGGGGGGGGGGGGG

SEQ ID NO: 715 - protein, 30 aa, Artificial Sequence
  Description of Artificial Sequence: Synthetic polypeptide
  MISC_FEATURE (1)..(30): This sequence may encompass 1-10 "Gly Gly Gly" repeating units
GGGGGGGGGGGGGGGGGGGGGGGGGGGGGG

SEQ ID NO: 716 - protein, 20 aa, Artificial Sequence
  Description of Artificial Sequence: Synthetic peptide
GGGGSGGGGSGGGGSGGGGS

SEQ ID NO: 717 - protein, 15 aa, Artificial Sequence
  Description of Artificial Sequence: Synthetic peptide
GGGGSGGGGSGGGGS
